(19) United States
(12) Patent Application Publication
(10) Pub. No.: US 2020/0362052 A1
(43) Pub. Date: Nov. 19, 2020

(54) COMPOSITIONS AND METHODS FOR TREATING TOLL-LIKE RECEPTOR-DRIVEN INFLAMMATORY DISEASES

(71) Applicant: Souvie Biodelivery, LLC, Tucson, AZ (US)

(72) Inventor: Souvenir Tachado, Tucson, AZ (US)

(21) Appl. No.: 16/986,063

(22) Filed: Aug. 5, 2020

Related U.S. Application Data
(63) Continuation-in-part of application No. PCT/US19/25207, filed on Apr. 1, 2019.
(60) Provisional application No. 62/882,963, filed on Aug. 5, 2019.
(60) Provisional application No. 62/651,621, filed on Apr. 2, 2018.

(51) Int. Cl. C07K 16/28; C07K 14/705; A61P 29/00

(52) U.S. Cl. CPC C07K 16/2896; C07K 14/70596; A61K 38/00; C07K 2319/30; A61P 29/00

(57) ABSTRACT

Many disorders wherein inflammation is a hallmark such as rheumatoid arthritis, sepsis, or cancer, are chronic and impose a significant burden on family and society due to their high morbidity and mortality. Each year the United States government spends $2.6T to treat chronic Inflammatory diseases, which are linked to 70% of the deaths every year. Protein therapeutics, such as anti-TNFα antibodies that selectively block the TNFα cascade, have become the mainstay therapy for the management of chronic inflammatory diseases. Despite the promise of these early studies, concerns about the side effects of these protein drugs, including induction of auto-antibodies and immuno-suppression, may limit the applications to disease treatments. Thus, there is a need to develop new drugs and delivery systems for the prevention and treatment of inflammatory diseases. The present invention relates to extracellular vesicle composition, system, and methods for treating Toll-like receptor-driven inflammatory disease.

### CROSS-REFERENCES TO RELATED APPLICATIONS

[0001] This application is a non-provisional and claims benefit of U.S. Provisional Application No. 62/882,963 filed Aug. 5, 2019, the specification(s) of which is/are Incorporated herein in their entirety by reference.

[0002] This application is a continuation-in-part of PCT/US2019/025207 filed Apr. 1, 2019, which claims the benefit of the U.S. Provisional Application No. 62/651,621 filed Apr. 2, 2018, the specification(s) of which is/are incorporated herein in their entirety by reference.

### REFERENCE TO A SEQUENCE LISTING

[0003] Applicant asserts that the paper copy of the Sequence Listing is identical to the Sequence Listing in computer readable form found on the accompanying computer file, entitled SOUV_19_01_NP_Sequencing_Listing_ST25. The content of the sequence listing is incorporated herein by reference in its entirety.

### FIELD OF THE INVENTION

[0004] The present invention relates to extracellular vesicle composition, system and methods for treating Toll-like receptor-driven inflammatory disease.

### BACKGROUND OF THE INVENTION

[0005] Inflammation is a hallmark of many debilitating and life-threatening disorders, including inflammatory disease, rheumatoid arthritis, psoriasis, sepsis, atherosclerosis, Alzheimer's disease, and cancer. Many of these disorders are chronic and impose a significant burden to family and society due to their high morbidity and mortality. Each year the United States government spends $2.6T to treat chronic inflammatory diseases, which are linked to 70% of the deaths every year. Endosomal Toll-like receptors (TLR3, TLR7, TLR8 and TLR9), which are activated by molecules originating from either endogenous or exogenous sources, are important mediators of inflammation. Endogenous sources of inflammation include the release of mitochondrial DNA, which activates TLR9. Exogenous sources include viral RNA or microRNAs, which activate TLR3 or TLR7/8, respectively. Cell surface expressed TLRs include TLR1, TLR2, TLR4, TLR5, TLR6 and TLR10. They recognize bacterial lipoproteins (TLR 2/6), flagellin (TLR5), lipopolysaccharides (TLR4). Preventing these TLR-mediated inflammatory responses could reduce the health care burdens in the United States.

[0006] While many genetic and environmental factors play a prominent role in disease progression, the proinflammatory cytokines such as TNFα, IL-1@, IL-6. IL-12, IL-18, IL-21, IL-22. IL-26, IFN-© are recognized as the central players in eliciting proinflammatory cascades. Protein therapeutics, such as anti-TNFα antibodies that selectively block the TNFα cascade, has become the mainstay therapy for the management of chronic inflammatory diseases.

[0007] Despite the promise of the early studies, concerns about the side effects of these protein drugs, including induction of auto-antibodies and immuno-suppression, may limit the applications to disease treatments.

[0008] Furthermore, the efficacy of antibody-based therapies is limited by their rapid clearance and poor penetration of tissues. Thus, there is a need to develop new drugs and delivery systems for the prevention and treatment of inflammatory diseases.

### BRIEF SUMMARY OF THE INVENTION

[0009] It is an objective of the present invention to provide an engineered extracellular vesicle composition as well as a method of use that allows for the treatment of Toll-like receptor driven inflammatory diseases, as specified in the independent claims. Embodiments of the invention are given in the dependent claims. Embodiments of the present invention can be freely combined with each other if they are not mutually exclusive.

[0010] The present invention may feature an engineered extracellular vesicle, preferably exosomes, comprising a fusion protein having tetraspanin, or functional fragment thereof, linked to anti-TLR antibody, or functional fragment thereof, that serve as a targeting moiety and inhibits the activation of a cell surface expressed TLR to induce proinflammatory responses. In some embodiments the anti-TLR antibody is expressed on the exterior of the engineered extracellular vesicle.

[0011] The present invention may feature a pharmaceutical composition comprising an engineered extracellular vesicle. In some embodiments, the engineered extracellular vesicle comprises a fusion protein having tetraspanin, or a functional fragment thereof, linked to an anti-TLR antibody, or a functional fragment thereof, that inhibits a cell surface expressed TLR, and a pharmaceutically acceptable carrier or excipient.

[0012] Additionally, the present invention may feature a method of preventing the production of anti-drug antibodies, in an individual treated with biologics or a method of preventing immunosuppression in an individual treated with anti-TNFα biologic.

[0013] The present Invention may feature an exosome-based delivery system for delivering a therapeutic molecule to a cell. In some embodiments, delivery system comprises a fusion protein comprising a therapeutic molecule comprising an anti-TLR antibody, or functional fragment thereof, fused with a tetraspanin, or functional fragment thereof. In some embodiments, the tetraspanin, or functional fragment thereof, is positioned at a surface of an exosome. In some embodiments, the anti-TLR antibody, or functional fragment thereof will serve as a targeting moiety and neutralizing its effects by inhibiting dimerization of TLR receptors thereby dampening proinflammatory responses. The anti-TLR antibody serves a dual function: as a targeting moiety and inhibition of signaling cascade driven by TLR activation. The end result is dampening of proinflammatory responses.

[0014] Furthermore, the present invention may feature a dominant-negative engineered extracellular vesicle, wherein said extracellular vesicle comprises: a tetraspanin, or functional fragment thereof; a cleavable linker; and a dominant-negative fragment of a TLR receptor

[0015] There is a substantial need for an alternative drug treatment for chronic inflammatory autoimmune diseases. TNFα inhibitors remain the gold standard of biological therapies for autoimmune diseases such as rheumatoid arthritis (RA), even though approximately 30% of patients show no significant improvement with TNFα inhibitors. In addition, some patients become refractory to treatment over time, due to the production of inhibitory antibodies against anti-TNFα biologicals as well as immunosuppression. This maladaptive response may negate their therapeutic effectiveness in chronic disease conditions, which require prolonged drug treatment. Described herein are engineered extracellular vesicles, e.g., engineered exosomes, and methods of use, which avoid the production of anti-drug antibodies (ADAs), because the anti-endosomal TLR antibody (payload) is protected inside the exosomes and treated as “self” by the immune system, avoiding rapid clearance and reducing toxicity associated with the current drug delivery systems (DDS).

[0016] Despite showing promising applications, many of these synthetic DDS face issues of poor biocompatibility, sub-optimal targeting specificity and poor tissue penetration. In contrast, exosomes are endosomally-derived nanoparticles that are secreted by a variety of cell types and tissues and can specifically transfer material to recipient cells in a targeted manner. The exosome is one of nature's ways of delivering different proteins to desired cell-recipients, thereby providing the advantage of biocompatibility and reduced clearance rates. Provided herein are engineered exosomes, systems, and methods for targeting anti-inflammatory agents to interact solely with inflammatory cells, thereby avoiding unwanted off-target side-effects that can affect the efficacy or toxicology profile (FIG. 1).

[0017] An important requirement for endosomal TLR activation is cleavage of the TLR ectodomains by specific proteases, such as cathepsins, via their Z-loops when they reach the endosomal compartment from the endoplasmic reticulum. The methods, engineered extracellular vesicles, and systems provided herein block TLR ligand interaction by delivering exosomal-encapsulated anti-TLR antibodies (neutralizing antibodies) to endosomal compartments.

[0018] Proteolytic cleavage by endosome-resident proteases (cathepsins, AEP, furin-like proteases, and the like; Table 1) will then release these antibody-based TLR antagonists from their exosomal bound sites to inhibit TLR receptor dimerization, activation and induction of proinflammatory responses.

[0019] One of the unique and inventive technical features of the present invention is positioning the anti-TLR antibody on the outside surface of the engineered extracellular vesicle. Without wishing to limit the invention to any theory or mechanism, it is believed that the technical feature of the present invention advantageously provides the engineered extracellular vesicle not only the ability to hone in on specific target cells expressing cell surface TLR receptors, but also allows the engineered extracellular vesicle bearing the neutralizing antibody the ability to directly neutralize the target diseased cells. The advantage of such method is specific cell targeting thereby eliminating side effects. Additionally, the use of an engineered exosome allows for an increase in biocompatibility as exosomes are secreted by various cell types and tissues and specifically transfer material to recipient cells in a targeted manner. None of the presently known prior references or work has the unique inventive technical feature of the present invention.

[0020] Furthermore, the prior references teach away from the present Invention. For example, as previously discussed, constraints affecting nanotechnologies delivering of molecular cargo to specific cells or tissues include: 1) biocompatibility 2) molecular cargo loading efficiency, 3) specificity of the delivery platform to cells or tissue of interest. Furthermore, the inventive technical features of the present invention contributed to a surprising result. For example, instead of neutralizing the effects of TLR-triggered induction of proinflammatory responses, it enhances it leading to cytokine storms.

[0021] Additionally, the present invention may also provide a unique advantages by the methods and compositions described herein include that: the payload is protected from degradation by encapsulation in exosomal vesicles in the case of endosomal TLRs and has the potential of avoiding the formation of ADAs; specific targeting to the intended inflammatory cells (while avoiding off-target cells) is achieved using monocyte-derived exosomes, which display the immunologically-appropriate repertoire of surface antigens; the payload is taken up and trafficked to the correct intracellular compartment (endosomes), thus avoiding off-target effects in other sub-cellular compartments: the unique and inventive features of the present invention is the linker peptide is cleaved by intra-endosomal proteases/endopeptidases, or the like, to yield free payload in the endosomal compartment; the payload specifically binds an intracellular target receptor (e.g., a toll-like receptor (“TLR”)) and blocks pro-inflammatory signaling; the treatment is suitable for acute inflammatory indications, since the payload can remain temporarily active (1-2 hours) until endosomal processes degrade the payload, thus bringing to an end the anti-inflammatory effect of the composition; and the treatment is suitable for chronic inflammatory indications with repeated dosing.

[0022] Any feature or combination of features described herein are included within the scope of the present Invention provided that the features included in any such combination are not mutually inconsistent as will be apparent from the context, this specification, and the knowledge of one of ordinary skill in the art. Additional advantages and aspects of the present invention are apparent in the following detailed description and claims.

### INCORPORATION BY REFERENCE

[0023] Herein, all issued patents, published patent applications, and non-patent publications that are mentioned in this specification are herein incorporated by reference in their entirety for all purposes, to the same extent as if each individual issued patent, published patent application, or non-patent publication were specifically and individually indicated to be incorporated by reference.

### BRIEF DESCRIPTION OF THE SEVERAL VIEWS OF THE DRAWING(S)

[0024] The features and advantages of the present invention will become apparent from a consideration of the following detailed description presented in connection with the accompanying drawings in which:

[0025] FIG. 1A shows a schematic of surface engineering of exosome via tetraspanin proteins. Peptides can be fused with CD63 either at the amino or carboxy terminus or on Inner loops or outer loops of CD63.

[0026] FIG. 1B shows the delivery of CD63 fusion genes into living cells will partition the displayed the engineered exosomes inside the exosome via CD63 anchoring.

[0027] FIGS. 1C-D show how engineered exosomes are released into the culture medium that can be recovered with polymer-based precipitation solution and centrifugation.

[0028] FIG. 2A shows mammalian expression vector and configuration of CD63-linker-anti-TLR antibody. Promoter sequences derived from cytomegalovirus (CMV) or elongation factor alpha (EF1.) are fused to drive expression of the fusion and puromycin-resistance genes respectively.

[0029] FIG. 2B shows a schematic illustration of vectors expressing chimera containing anti-TLR7 antibody or a control containing RFP or GFP.

[0030] FIG. 3 shows TLR signaling assay for rapid screening of antibodies. Transferrin-mediated uptake of protein complexes to the endosome delivers antibodies that are released upon acidification. Free antibodies bind TLR receptor and block signaling in reporter cells. Inhibition of signaling decreases the secretion of alkaline phosphatase enzyme (SEAP) into culture medium. SEAP enzymatic activity will be measured using substrate 4-methylumbelliferyl phosphate (4-MUP) to detect fluorescent 4-methylumbelliferone (4-MU) via microplate spectrofluorimeter. SA, streptavidin or NeutrAvidin. Btn, biotin.

[0031] FIGS. 4A-4C show protein complexes bearing anti-TLR9 antibody inhibit TLR9 signaling in receptor cells. FIG. 4A shows HEK-TLR9 NFkB cells treated with CpG DNA oligo (ODN 2006) in LyoVec secrete SEAP into the medium (as shown by the initial rate of 4-MUP hydrolysis by AP enzyme), whereas HEK-NFkB control cells do not. FIG. 4B shows HEK-TLR9 NFkB cells treated with CpG (10 μg/mL In LyoVec) secrete SEAP into the medium, but pre-treatment with protein complexes (containing endosome-trafficked transferrin) that bear the anti-TLR9 polyclonal antibody payload inhibited SEAP secretion in a concentration-dependent manner. Protein complexes bearing non-specific IgG had no effect. FIG. 4C shows neither the TLR7 agonist imiquimod nor LyoVec could stimulate TLR9 signaling in HEK-TLR9 NFkB cells. Pre-treatment with free antibody (either non-specific IgG or ant-TLR9 antibody) did not Inhibit CpG/LyoVec-stimulated TLR9 signaling. Pre-treatment with the protein complex armed with control IgG did not inhibit TLR9 signaling with CpG/LyoVec, but by comparison, protein complexes loaded with anti-TLR9 antibody payload demonstrated inhibition of signaling in a concentration dependent manner with 9 nM and 18 nM anti-TLR9 complex (* p<0.05; * p<0.01).

[0032] FIG. 5 shows anti-TLR antibody (Ab) inhibits imiquimod-induced NFkB activation in a dose dependent manner in reporter cells. Western blot analysis of reporter cells following Inhibition of phospho IκB with anti-TLR9 Ab and incubated with imiquimod. Membranes were probed with anti-phospho IκB and immunoreactive bands were detected with HRP-conjugated secondary antibody. Total IκB was used to validate protein loading equivalence after stripping the membrane. Western blot is a representative experiment of one or four independent experiments with similar results.

[0033] FIG. 6 shows the centrifugation-precipitation protocol for exosome isolation.

[0034] FIG. 7 shows engineered exosomes bearing anti-TLR4 Ab targets TLR4 receptor, that inhibits LPS-driven inflammatory response.

### DETAILED DESCRIPTION OF THE INVENTION

[0035] The section headings used herein are for organizational purposes only and are not to be construed as limiting the subject matter described.

### Definitions

[0036] Unless otherwise defined herein, scientific and technical terms used in connection with the present application shall have the meanings that are commonly understood by those of ordinary skill in the art. Further, unless otherwise required by context, singular terms shall include pluralities and plural terms shall include the singular. Thus, as used in this specification and the appended claims, the singular forms “a,” “an,” and “the” include plural referents unless the context clearly indicates otherwise. For example, reference to “a protein” includes a plurality of proteins; reference to “a cell” includes populations of a plurality of cells.

[0037] Extracellular Vesicles:

[0038] Provided herein, are engineered extracellular vesicles, preferably an engineered exosome, comprising a fusion protein having tetraspanin, or a functional fragment thereof, linked to an anti-TLR antibody, or a functional fragment thereof, wherein the anti-TLR antibody inhibits an endosomal TLR activity. In some embodiments, the extracellular vesicle is selected from an exosome, ectosome or microvesicle. In a particular embodiment, the extracellular vesicle is an exosome.

[0039] The terms “extracellular vesicle” or “EV” as used herein shall be understood to relate to any type of vesicle that is obtainable from a cell in any form, including for example, a microvesicle (e.g. any vesicle shed from the plasma membrane of a cell), an exosome (by exocytosis of multivesicular bodies [MVBs], ectosomes (by shedding of the cell surface membrane), apopttic bodies, nanoparticles, microparticles, shedding vesicles, shedding bodies, exovesicles, and the like. As used herein, the phrase “engineered extracellular vesicle” refers to an EV, or vesicle, that includes at least one or more proteins that are not naturally occurring in an exosome, or that do not naturally occur together in an extracellular vesicle, such an exosome. In some embodiments, the extracellular vesicle used herein is an Exosome.

[0040] As used herein, the phrase “engineered exosome” refers to an exosome, or vesicle, that Includes at least one or more proteins that are not naturally occurring in an exosome, or that do not naturally occur together in an exosome. Exosomes are natural cell-derived extracellular vesicles with a diameter of about 40-120 nm that originate from internal endocytic compartments, multivesicular bodies, and participate in intercellular communication as well as transport of genetic material. Because of their ideal native structure and characteristics, exosomes are contemplated herein to be promising nanocarriers for clinical use. Compared to synthetic nanoformulations, exosomes provide the advantage of enhancing delivery and therapeutic efficacy due to their native biocompatibility in vivo. Exosomes are lipid bilayer vesicles that form intracellularly upon inward invagination of endosome membranes and are generated as intraluminal vesicles by reverse budding of membrane multivesicular bodies (MVBs). Fusion of MVBs limiting membrane with the plasma membrane triggers the release of exosomes into the extracellular milieu. Exosomes incorporate messenger RNAs (mRNAs), micro RNAs (miRNAs), proteins, and lipids, that are functional in target cells, miRNAs transferred by tumor-derived exosomes downregulate the TAK signaling pathway in hepatocarcinogenesis and are pivotal in promoting tumor metastasis via proinflammatory cytokine-driven expansion of myeloid-derived suppressor cells. Exosomal Epstein Barr virus (EBV) miRNAs induce a concentration-dependent repression of an immunoregulatory gene CXCL11/ITAC, inducing EBV-associated lymphomas. Exosomes isolated from HIV-infected cells and sera from HIV-infected persons were shown to contain HIV-TAR miRNA and regulate apoptosis in bystander cells. It has been demonstrated that HIV produces novel miRNAs associated with exosomes derived from HIV-infected macrophages and sera from HIV-infected persons (see Bernard et al., Novel HIV-1 miRNAs stimulate TNF(release in human macrophages via TLR8 signaling pathway. PLoS One. 2014; 9(9):e106006. PubMed PMID: 25191859: PubMed Central PMCID: PMC4156304).

[0041] Exosomes are engineered at the cellular level under natural conditions. In accordance with the present invention, exosomes are provided having and anti-TLR cargo or payload, wherein the engineered exosome serves as a cell-derived gene delivery vehicle carrying the anti-TLR therapeutic proteins (biologics) for treating various diseases caused by endosomal or surface receptor TIR-driven inflammation, as well as for treating cytokine storm.

[0042] As used herein, the term “microvesicle” (also referred to as, circulating microvesicles, or microparticles) or refers to a type of extracellular vesicle (EV), between about 25 to about 1500 nanometers (nm) in diameter, or in other embodiments between about 50 and 1,000 nm in diameter, found in many types of body fluids as well as the interstitial space between cells. Microvesiles are circular fragments of plasma membrane ranging from 100 nm to 1000 nm shed from almost all cell types. Microvesicles play a role in intercellular communication and can transport mRNA, miRNA, lipids, and proteins between cells. Microvesicles have been implicated in the process of a remarkable anti-tumor reversal effect in cancer, tumor Immune suppression, metastasis, tumor-stroma interactions and angiogenesis along with having a primary role in tissue regeneration. They originate directly from the plasma membrane of the cell and reflect the antigenic content of the cells from which they originate. Microvesicles have a role in cell signaling and the process of molecular communication between cells, and are released by a number of cell types. Microvesiles are generally considered to be a heterogeneous population of exosomes (<100 nm) and shed microvesicles (100-1000 nm), which are similar but have distinct mechanisms of formation. Through these mechanisms, microvesicles are released into the extracellular space and interact with specific target cells, delivering bioactive molecules.

[0043] As used herein, the term “ectosorme” refers to a type of extracellular vesicle (EV) that is assembled in the plasma membrane; and are discrete plasma membrane domains marked by layers of dense material associated to their cytosolic surface. Ectosome domains undergo outward budding followed by their pinching off as round vesicles.

[0044] As used herein, the term “tetraspanin,” or “tetraspnnin,” or “TSPAN,” used herein interchangeably, refers to a protein belonging to the transmembrane 4 superfamily (TM4SF) of proteins. Tetraspanins possess four transmembrane domains, intracellular N- and C-termini, and two extracellular domains: one short extracellular domain, called the “small extracellular domain or loop,” “SED/SEL” or “EC1”; and one longer extracellular domain (typically, about 100 amino acid residues in length), called the “large extracellular domain/loop,” “LED/LEL,” or “EC2.” Typically, there are four or more cysteine residues in the EC2 domain, with two in a highly conserved “CCG” motif. Tetraspanins are characterized by conserved domains listed in the Conserved Domains database of the National Center for Biotechnology Information (NCBI) under pfam00335. Tetraspanins are involved in diverse physiological processes, such as cell activation and proliferation, adhesion and motility, differentiation, oncogenesis, and others. A “functional fragment” of a tetraspanin is a subpart of a tetraspanin molecule that still maintains at least one biological function of the complete tetraspanin, for example, binding a natural ligand of the tetraspanin. Examples of tetraspanins (or functional fragments thereof) useful in practicing the invention include, but are not limited to: TSPAN1, TSPAN2, TSPAN3, TSPAN4, TSPAN5, TSPAN6, TSPAN7, TSPAN8, TSPAN9, TSPAN10, TSPAN11, TSPAN12, TSPAN13, TSPAN14, TSPAN15, TSPAN16, TSPAN17, TSPAN18, TSPAN19, TSPAN20 (uroplakin 1B), TSPAN21 (uroplakin1A) TSPAN22 (peripherin2), TSPAN23 (retinal outer segment membrane protein1), TSPAN24 (CD151), TSPAN25 (CD53), TSPAN26 (CD37), TSPAN27 (CD82), TSPAN28 (CD81), TSPAN29 (CD9), TSPAN30 (CD63), TSPAN31, TSPAN32, TSPAN33, and TSPAN34. In a particular embodiment, the tetraspanin is TSPAN30 (CD63).

[0045] In some embodiments, the fusion protein for use herein is a tetraspanin-anti-TIR antibody fusion protein, wherein the anti-TLR moiety, or fragment thereof, is fused within one of the extracellular loops (e.g. EC2 domain, NH2 domain) of the tetraspanin protein.

[0046] The term “endosomal TLR” refers to an intracellular toll-like receptor in an endosome. Nucleic-acid sensing TIRs reside in the endosome and consist of TLR3 (recognizing viral dsRNA); TLR7 and TLR8 (recognizing viral ssRNA): and TLR9 (recognizing bacterial and viral unmethylated CpG-containing DNA motifs). The restricted access to these intracellular TLRs is one mechanism that prevents them from being aberrantly activated by self-nucleic acids under physiological conditions. However, nucleic acids released from apoptotic cells can activate these TLRs and instigate autoimmune diseases. Moreover, nucleic acids derived from viruses during cytosolic replication can be transported into endosomes during the process of autophagy where they activate endosomal TLRs. Under normal physiological conditions, the localization of endosomal TLRs to intracellular compartments prevents their activation by self-nucleic acids, because self-nucleic acids from dead cells in damaged tissues are unable to passively permeate across other cells and enter into endosomes. In contrast, in the case of psoriasis, tolerance to self-nucleic acids can be breached under some pathological conditions. For example, the human antimicrobial peptide LL37 is upregulated and delivered to inflammatory sites in psoriatic skin where it forms complexes with self-nucleic acids to facilitate their entry into dendritic cells (DCs) and subsequently activate endosomal TLRs, an event that renders nonstimulatory self-nucleic acids potent immune stimuli.

[0047] Endosomal TLR3, 7, 8, and 9 are believed to be involved in a number of autoimmune diseases such as psoriasis, systemic lupus erythematous, rheumatoid arthritis, as well as cytokine storm. The development of the therapeutics to inhibit the endosomal TLRs or components of their signaling cascades is contemplated herein to provide a way to target inflammation upstream of inflammatory cytokine production. Despite the high therapeutic potential of existing drugs, their application for clinical medicine is still limited due to the lack of an appropriate drug delivery system that provides access to the TLR targets. Furthermore, the problem of implementing effective and nontoxic delivery is a severe impediment to their future therapeutic application. An effective therapeutic alternative that can be tolerated for ng periods would therefore shift the current paradigm. In accordance with the present invention, methods are provided to modulate the proinflammatory endosomal TLR-induced immune responses using engineered exosomes carrying antibodies capable of blunting their activation. Anti-TLR antibody payloads, contained within the fusion proteins and the engineered exosomes described herein, which bind the dimer-interfaces of TLR monomers, are provided in the fusion proteins described herein and the methods of using such fusion proteins and exosomes comprising them to block ligand-mediated dimerization of TLR receptor, thereby blocking pro-inflammatory signaling.

[0048] In other embodiments, the anti-TLR is fused to an antibody Fab region. In other embodiments, as set forth in Example 1.4 herein, cells can be treated with engineered exosomes comprising a tetraspanin, such as CD63 and the like, fused to defective domains, e.g., extracellular domains, and the like, of either TLR1, 2, 3, 4, 5, 6 7, 8, 9 or 10 that are defective for intracellular signaling, instead of being fused to an scFv or Fab. In particular embodiments, a dominant-negative extracellular vesicle, the tetraspanin, such as CD63, can be a fragment thereof lacking a transmembrane (e.g., 0204-224) and/or cytoplasmic domain (e.g., 0225-238)) fused to a cleavable linker (e.g., a Z-domain) fused to domains of TLR3 (lacking signal peptide and TRIF domain) or TLR7, 8, or 9 (lacking the signal peptide and TIR domains). After cleavage, the newly liberated soluble receptors undergo ligand-mediated heterodimerization with intact endosomal TLR and block pro-inflammatory signaling. Accordingly, also provided herein are dominant-negative engineered extraceluar vesicles, wherein said extracellular vesicle comprises: a tetraspanin, or fragment thereof; a cleavable linker: and a dominant-negative fragment of a TLR receptor. As used herein, the phrase “dominant-negative” (DN), in the context of TLR receptors, refers to a TLR fragment that is defective in accomplishing its natural intracellular signaling.

[0049] As used herein, the phrase “anti-TLR antibody” refers to an antibody that specifically binds to a toll-like receptor and neutralizes its effects. Particular anti-TLR antibodies, or TLR-binding fragments thereof, are antagonistic to native TLR activity. Exemplary anti-TLR antibodies, or TLR-binding fragments thereof, bind the dimer-interfaces of TLR monomers and block ligand-mediated dimerization of TLR receptor thus blocking pro-inflammatory signaling. In particular embodiments, the anti-TLR antibody specifically binds a toll-like receptor selected from the group consisting of TLR1, TLR2, TLR3, TLR4, TLR5, TLR, TLR7, TLR8,TLR9, and TLR10.

[0050] In other embodiments, the anti-TLR antibody, or functional fragment thereof, inhibits the binding of an endosomal or surface TLR to a ligand of the TLR. In other embodiments, the anti-TLR antibody, or functional fragment thereof, inhibits dimerization of an endosomal or surface TLR. In other embodiments, the anti-TLR antibody, or functional fragment thereof, inhibits endosomal or surface TLR activation via competitive or non-competitive inhibition.

[0051] The term “antibody,” or interchangeably “Ab,” is used in the broadest sense and includes fully assembled antibodies, monoclonal antibodies (including human, humanized or chimeric antibodies), polyclonal antibodies, multi-specific antibodies (e.g., bispecific antibodies), and antibody fragments that can bind antigen (e.g., Fab, Fab′, F(ab′)2, Fv, single chain antibodies, diabodies), comprising complementarity determining regions (CDRs) of the foregoing as long as they exhibit the desired biological activity. Multimers or aggregates of intact molecules and/or fragments, including chemically derivatized antibodies, are contemplated. Antibodies of any isotype class or subclass, including IgG, IgM, IgD, IgA, and IgE, IgG1, IgG2, IgG3, IgG4, IgA1 and IgA2, or any allotype, are contemplated. Different isotypes have different effector functions; for example, IgG1 and IgG3 isotypes have antibody-dependent cellular cytotoxicity (ADCC) activity.

[0052] The term “monocional antibody” (or “mAb”) as used herein refers to an antibody obtained from a population of substantially homogeneous antibodies, i.e., the individual antibodies comprising the population are identical except for possible naturally occurring mutations that may be present in minor amounts. Monoclonal antibodies that are antigen binding proteins are highly specific binders, being directed against an individual antigenic site or epitope, in contrast to polyclonal antibody preparations that typically include different antibodies directed against different epitopes. Non-limiting examples of monoclonal antibodies include murine, rabbit, rat, chicken, chimeric, humanized, or human antibodies, fully assembled antibodies, multi-specific antibodies (including bispecific antibodies), antibody fragments that can bind an antigen (including, Fab, Fab′, F(ab)2, Fv, single chain antibodies, diabodies), maxibodies, nanobodies, and recombinant peptides comprising CDRs of the foregoing as long as they exhibit the desired biological activity, or variants or derivatives thereof.

[0053] The modifier “monocional” indicates the character of the antibody as being obtained from a substantially homogeneous population of antibodies, and is not to be construed as requiring production of the antibody by any particular method. For example, monoclonal antibodies may be made by the hybridoma method first described by Kohler et al., Nature, 256:495 (1975), or may be made by recombinant DNA methods (see, e.g., U.S. pat. No. 4,816,567). The “monoclonal antibodies” (or “mAbs”) may also be isolated from phage antibody libraries using the techniques described in Clackson et al., Nature, 352:624-628 (1991) and Marks et al., J. Mol. Biol., 222:581-597 (1991), for example.

[0054] In an “antibody,” each tetramer is composed of two identical pairs of polypeptide chains, each pair having one “light” chain of about 220 amino acids (about 25 kDa) and one “heavy” chain of about 440 amino acids (about 50-70 kDa). The amino-terminal portion of each chain includes a “variable” (“V”) region of about 100 to 110 or more amino acids primarily responsible for antigen recognition. The carboxy-terminal portion of each chain defines a constant region primarily responsible for effector function. The variable region differs among different antibodies. The constant region is the same among different antibodies. Within the variable region of each heavy or light chain, there are three hypervariable subregions that help determine the antibody's specificity for antigen in the case of an antibody that is an antigen binding protein. The variable domain residues between the hypervariable regions are called the framework residues and generally are somewhat homologous among different antibodies. Immunoglobulins can be assigned to different classes depending on the amino acid sequence of the constant domain of their heavy chains. Human light chains are classified as kappa ( [symbol] ) and lambda (λ) light chains. Within light and heavy chains, the variable and constant regions are joined by a “J” region of about 12 or more amino acids, with the heavy chain also including a “D” region of about 10 more amino acids. See generally, Fundamental Immunology, Ch. 7 (Paul, W., ed., 2nd ed. Raven Press, N.Y. (1989)). An “antibody” also encompasses a recombinantly made antibody, and antibodies that are glycosylated or lacking glycosylation.

[0055] The term “light chain” or “immunogobulin light chain” includes a full-length light chain and fragments thereof having sufficient variable region sequence to confer binding specificity. A full-length light chain includes a variable region domain, VL and a constant region domain, CL. The variable region domain of the light chain is at the amino-terminus of the polypeptide. Light chains include kappa ( [symbol] ) chains and lambda (└) chains.

[0056] The term “heavy chain” or “immunoglobulin heavy chain” includes a full-length heavy chain and fragments thereof having sufficient variable region sequence to confer binding specificity. A full-length heavy chain includes a variable region domain, VH, and three constant region domains, CH1, CH2, and C_{H3}. The VH domain is at the amino-terminus of the polypeptide, and the CH domains are at the carboxyl-terminus, with the CH3 being closest to the carboxy-terminus of the polypeptide. Heavy chains are classified as mu (μ), delta (™), gamma (©), alpha (<), and epsilon (Σ), and define the antibody's isotype as IgM, IgD, IgG, IgA, and IgE, respectively. Heavy chains may be of any isotype, including IgG (including IgG1, IgG2, IgG3 and IgG4 subtypes), IgA (including IgA1 and IgA2 subtypes), IgM and IgE. Several of these may be further divided into subclasses or isotypes, e.g. IgG1, IgG2, IgG3, IgG4, IgA1 and IgA2. Different IgG isotypes may have different effector functions (mediated by the Fc region), such as antibody-dependent cellular cytotoxicity (ADCC) and complement-dependent cytotoxicity (CDC). In ADCC, the Fc region of an antibody binds to Fc receptors (Fc©Rs) on the surface of immune effector cells such as natural killers and macrophages, leading to the phagocytosis or lysis of the targeted cells. In CDC, the antibodies kill the targeted cells by triggering the complement cascade at the cell surface.

[0057] An “Fc region,” or used interchangeably herein, “Fc domain” or “immunoglobulin Fc domain,” contains two heavy chain fragments, which in a full antibody comprise the Cm, and Cw domains of the antibody. The two heavy chain fragments are held together by two or more disulfide bonds and by hydrophobic interactions of the Cm domains.

[0058] The term “salvage receptor binding epitope” refers to an epitope of the Fc region of an IgG molecule (e.g., IgG1, IgG2, IgG3, IgG4) that is responsible for increasing the in vivo serum half-life of the IgG molecule.

[0059] For a detailed description of the structure and generation of antibodies, see Roth, D. B., and Craig, N. L., Cell, 94:411-414 (1998), herein incorporated by reference in its entirety. Briefly, the process for generating DNA encoding the heavy and light chain immunoglobulin sequences occurs primarily in developing B-cells. Prior to the rearranging and joining of various immunoglobulin gene segments, the V, D. J and constant (C) gene segments are found generally in relatively close proximity on a single chromosome. During B-cell-differentiation, one of each of the appropriate family members of the V. D, J (or only V and J in the case of right chain genes) gene segments are recombined to form functionally rearranged variable regions of the heavy and light immunoglobulin genes. This gene segment rearrangement process appears to be sequential. First, heavy chain D-to-J joints are made, followed by heavy chain V-to-DJ joints and light chain V-to-J joints. In addition to the rearrangement of V, D and J segments, further diversity is generated in the primary repertoire of immunoglobulin heavy and light chains by way of variable recombination at the locations where the V and J segments in the light chain are joined and where the D and J segments of the heavy chain are joined. Such variation in the light chain typically occurs within the last codon of the V gene segment and the first codon of the J segment. Similar imprecision in joining occurs on the heavy chain chromosome between the D and JH segments and may extend over as many as 10 nucleotides. Furthermore, several nucleotides may be inserted between the D and JH and between the VH and D gene segments which are not encoded by genomic DNA. The addition of these nucleotides is known as N-region diversity. The net effect of such rearrangements in the variable region gene segments and the variable recombination which may occur during such joining is the production of a primary antibody repertoire.

[0060] The term “hypervariable” region refers to the amino acid residues of an antibody which are responsible for antigen-binding. The hypervariable region comprises amino acid residues from a complementarity determining region or CDR [i.e., residues 2434 (L1), 50-56 (12) and 89-97 (L3) in the light chain variable domain and 31-35 (H1), 5065 (H2) and 95-102 (H3) in the heavy chain variable domain as described by Kabat et al., Sequences of Proteins of Immunological Interest, 5th Ed. Public Health Service, National institutes of Health, Bethesda, Md. (1991)]. Even a single CDR may recognize and bind antigen, although with a lower affinity than the entire antigen binding site containing all of the CDRs.

[0061] An alternative definition of residues from a hypervariable “loop” is described by Chothia et al., J. Mol. Biol. 196: 901-917 (1987) as residues 26-32 (L1), 50-52 (12) and 91-96 (L3) in the light chain variable domain and 28-32 (H1), 53-55 (H2) and 96-101 (H3) in the heavy chain variable domain.

[0062] “Framework” or “FR” residues are those variable region residues other than the hypervariable region residues.

[0063] “Antibody fragments” comprise a portion of an intact full-length antibody, preferably the antigen binding or variable region of the intact antibody. Examples of antibody fragments include Fab, Fab′, F(ab′)2, and Fv fragments; diabodies; linear antibodies (Zapata et al., Protein Eng., 8(10):1057-1062 (1995)); single-chain antibody molecules; and multi-specific antibodies formed from antibody fragments.

[0064] Pepain digestion of antibodies produces two identical antigen-binding fragments, called “Fab” fragments, each with a single antigen-binding site, and a residual “Fc” fragment which contains the constant region. The Fab fragment contains all of the variable domain, as well as the constant domain of the light chain and the first constant domain (C_{H1}) of the heavy chain. The Fc fragment displays carbohydrates and is responsible for many antibody effector functions (such as binding complement and cell receptors), that distinguish one class of antibody from another.

[0065] Pepsin treatment yields an F(ab′)₂ fragment that has two “Single-chain Fv” or “scFv” antibody fragments comprising the VH and VL domains of antibody, wherein these domains are present in a single polypeptide chain. Fab fragments differ from Fab′ fragments by the inclusion of a few additional residues at the carboxy terminus of the heavy chain C_{H1} domain including one or more cysteines from the antibody hinge region. Preferably, the Fv polypeptide further comprises a polypeptide linker between the VH and VL domains that enables the Fv to form the desired structure for antigen binding. For a review of scFv see Pluckthun in The Pharmacology of Monoclonal Antibodies, vol. 113, Rosenburg and Moore eds., Springer-Vedag, New York, pp. 269-315(1994).

[0066] A “Fab fragment” is comprised of one light chain and the C_{H} and variable regions of one heavy chain. The heavy chain of a Fab molecule cannot form a disulfide bond with another heavy chain molecule.

[0067] A “Fab′ fragment” contains one light chain and a portion of one heavy chain that contains the VH domain and the C_{H1} domain and also the region between the C_{H1} and CH2 domains, such that an interchain disulfide bond can be formed between the two heavy chains of two Fab′ fragments to form an F(ab′)2 molecule.

[0068] A “F(ab′)2 fragment” contains two light chains and two heavy chains containing a portion of the constant region between the C_{H1} and C_{H2} domains, such that an interchain disulfide bond Is formed between the two heavy chains. A F(ab′)2 fragment thus is composed of two Fab′ fragments that are held together by a disulfide bond between the two heavy chains.

[0069] FV is the minimum antibody fragment that contains a complete antigen recognition and binding site. This region consists of a dimer of one heavy- and one light-chain variable domain in tight, non-covalent association. It is in this configuration that the three CDRs of each variable domain interact to define an antigen binding site on the surface of the VH VL dimer. A single variable domain (or half of an Fv comprising only three CDRs specific for an antigen) has the ability to recognize and bind antigen, although at a lower affinity than the entire binding site.

[0070] “Single-chain antibodies” are Fv molecules in which the heavy and light chain variable regions have been connected by a flexible linker to form a single polypeptide chain, which forms an antigen-binding region. Single chain antibodies are discussed in detail in international Patent Application Publication No. WO 88/01649 and U.S. Pat. Nos. 4,946,778 and 5,260,203, the disclosures of which are incorporated by reference in their entireties.

[0071] “Single-chain Fv” or “scFv” antibody fragments comprise the VH and VL domains of antibody, wherein these domains are present in a single polypeptide chain, and optionally comprising a polypeptide linker between the VH and VL domains that enables the Fv to form the desired structure for antigen binding (Bird et al., Science 242:423-426, 1988, and Huston et al., Proc. Natl. Acad. Sci. USA 85:5879-5883, 1988). An “Fd” fragment consists of the VH and CH, domains.

[0072] The term “diabodies” refers to small antibody fragments with two antigen-binding sites, which fragments comprise a heavy-chain variable domain (VH) connected to alight-chain variable domain (VL) in the same polypeptide chain (VH VL). By using a linker that is too short to allow pairing between the two domains on the same chain, the domains are forced to pair with the complementary domains of another chain and create two antigen-binding sites. Diabodies are described more fully in, for example, EP 404,097; WO 93/11161; and Hollinger et al., Proc. Natl. Acad. Sci. USA, 90:6444-6448 (1993).

[0073] A “domain antibody” is an immunologically functional immunoglobulin fragment containing only the variable region of a heavy chain or the variable region of alight chain. In some instances, two or more VH regions are covalently joined with a peptide linker to create a bivalent domain antibody. The two VH regions of a bivalent domain antibody may target the same or different antigens.

[0074] In general, an antibody, or antibody fragment, “specifically binds” to an antigen of interest when it has a significantly higher binding affinity for, and consequently is capable of distinguishing, that antigen, compared to its affinity for other unrelated proteins, under similar binding assay conditions. Typically, an antibody is said to “specifically bind” its target antigen when the dissociation constant (KD) is in the range of about 500 nM-10⁻⁸ M, or lower. The antibody specifically binds antigen with “high affinity” when the KD is 10⁻⁹ M or lower, and with “very high affinity” when the KD is 10⁻¹⁰ M or lower.

[0075] “Antigen binding region” or “antigen binding site” means a portion of a protein that specifically binds a specified antigen. For example, that portion of an antibody, or antibody fragment, that contains the amino acid residues that interact with an antigen and confer on the antigen binding protein its specificity and affinity for the antigen is referred to as “antigen binding region.” An antigen binding region typically includes one or more “complementary binding regions” (“CDRs”). Certain antigen binding regions also include one or more “framework” regions (“FRs”). A “CDR” is an amino acid sequence that contributes to antigen binding specificity and affinity. “Framework” regions can aid in maintaining the proper conformation of the CDRs to promote binding between the antigen binding region and an antigen. In a traditional antibody, the CDRs are embedded within a framework in the heavy and light chain variable region where they constitute the regions responsible for antigen binding and recognition. A variable region of an immunoglobulin antigen binding protein comprises at least three heavy or light chain CDRs, see, supra (Kabat et al., 1991, Sequences of Proteins of Immunological Interest. Public Health Service N.I.H., Bethesda, Md.; see also Chothia and Lesk, 1987, J. Mol. Biol. 196:901917; Chothia et al., 1989, Nature 342: 877-883), within a framework region (designated framework regions 1-4, FR1. FR2, FR3, and FR4, by Kabat et al., 1991, supra; see also Chothia and Lesk, 1987, supra).

[0076] The term “antigen” refers to a molecule or a portion of a molecule capable of being bound by a selective binding agent (e.g., an antibody or immunologically functional fragment of an antibody), and additionally capable of being used in an animal to produce antibodies capable of binding to that antigen. An antigen may possess one or more epitopes that are capable of interacting with different antibodies.

[0077] The term “epitope” is the portion of a molecule that is bound by an antibody (or antibody fragment). The term includes any determinant capable of specifically binding to an antibody (or antibody fragment), or to a T-cell receptor. An epitope can be contiguous or non-contiguous (e.g., in a single-chain polypeptide, amino acid residues that are not contiguous to one another in the polypeptide sequence but that within the context of the molecule are bound by the antigen binding protein). In certain embodiments, epitopes may be mimetic in that they comprise a three-dimensional structure that is similar to an epitope used to generate the antigen binding protein, yet they also comprise none or only some of the amino acid residues found in that epitope used to generate the antigen binding protein. Most often, epitopes reside on proteins, but in some instances may reside on other kinds of molecules, such as nucleic acids. Epitope determinants may include chemically active surface groupings of molecules such as amino acids, sugar side chains, phosphoryl or sulfonyl groups, and may have specific three-dimensional structural characteristics, and/or specific charge characteristics. Generally, antibodies specific for a particular target antigen will preferentially recognize an epitope on the target antigen in a complex mixture of proteins and/or macromolecules.

[0078] Pharmaceutical Compositions

[0079] Also provided herein are pharmaceutical compositions comprising an engineered extracellular vesicle, such as an engineered exosome as described herein, and a pharmaceutically acceptable carrier or excipient. Also provided herein, are methods of treating, preventing, ameliorating and/or inhibiting an inflammatory response in an individual in need thereof, the method comprising administering to the individual therapeutically effective amount of a pharmaceutical composition of the invention. The inflammatory response can be a symptom of viral infection, autoimmune disease or chronic immune activation. In some embodiments, the extracellular vesicle is selected from an exosome, ectosome or microvesicle. In a particular embodiment, the extracellular vesicle is an engineered exosome.

[0080] As used herein, a pharmaceutical composition refers to any mixture comprising an engineered extracellular vesicle provided herein, such as an engineered exosome. It can be a solution, a suspension, liquid, powder, a paste, aqueous or non-aqueous formulations or any combination thereof.

[0081] Pharmaceutical compositions containing the engineered extracellular vesicles described herein, either as separate agents or in combination in a composition mixture can be formulated in any conventional manner by mixing a selected amount of the respective extracellular vesicle, such as an engineered exosome, with one or more physiologically acceptable carriers or excipients. Selection of the carrier or excipient is within the skill of the administering profession and can depend upon a number of parameters. These include, for example, the mode of administration (i.e., systemic, oral, nasal, pulmonary, local, topical, or any other mode) and disorder treated. The pharmaceutical compositions provided herein can be formulated for single dosage (direct) administration or for dilution or other modification. The concentrations of the compounds in the formulations are effective for delivery of an amount, upon administration, that is effective for the intended treatment. Typically, the compositions are formulated for single dosage administration. To formulate a composition, the weight fraction of an EV, e.g., and exosome, or mixture thereof is dissolved, suspended, dispersed, or otherwise mixed in a selected vehicle at an effective concentration such that the treated condition is relieved or ameliorated.

[0082] The terms “administering” and “administration” refer to methods of providing a pharmaceutical preparation to a subject. Such methods are well known to those skilled in the art and Include, but are not limited to, administering the compositions orally, intranasally, intratracheally, eye drops, intrathecal, parenterally (e.g., intravenously and subcutaneously), by intramuscular injection, by intraperitoneal injection, intrathecally, transdermally, extracorporeally, topically or the like.

[0083] Generally, pharmaceutically acceptable compositions are prepared in view of approvals for a regulatory agency or other prepared in accordance with generally recognized pharmacopeia for use in animals and in humans. Pharmaceutical compositions can include carriers such as a diluent, adjuvant, excipient, or vehicle with which an isoform is administered. Such pharmaceutical carriers can be sterile liquids, such as water and oils, including those of petroleum, animal, vegetable or synthetic origin, such as peanut oil, soybean oil, mineral oil, and sesame oil. Water is a typical carrier when the pharmaceutical composition is administered intravenously. Saline solutions and aqueous dextrose and glycerol solutions also can be employed as liquid carriers, particularly for injectable solutions.

[0084] It is understood that appropriate doses depend upon a number of factors within the level of the ordinarily skilled physician, veterinarian, or researcher. The dose(s) of the small molecule will vary, for example, depending upon the identity, size, and condition of the subject or sample being treated, further depending upon the route by which the composition is to be administered, if applicable, and the effect which the practitioner desires the therapeutic agent to have upon the subject. Exemplary doses include milligram or microgram amounts of the therapeutic agent per kilogram of subject or sample weight (e.g., about 1 microgram per kilogram to about 500 milligrams per kilogram, about 100 micrograms per kilogram to about 5 milligrams per kilogram, or about 1 microgram per kilogram to about 50 micrograms per kilogram). It is furthermore understood that appropriate doses depend upon the potency. Such appropriate doses may be determined using the assays known in the art. When one or more of these compounds is to be administered to an animal (e.g., a human), a physician, veterinarian, or researcher may, for example, prescribe a relatively low dose at first, subsequently increasing the dose until an appropriate response is obtained. In addition, it is understood that the specific dose level for any particular animal subject will depend upon a variety of factors including the activity of the specific compound employed, the age, body weight, general health, gender, and diet of the subject, the time of administration, the route of administration, the rate of excretion, and any drug combination.

[0085] Parenteral compositions may be formulated in dosage unit form for ease of administration and uniformity of dosage. Dosage unit form as used herein refers to physically discrete units suited as unitary dosages for the subjects to be treated; each unit containing a predetermined quantity of compound of the invention calculated to produce the desired therapeutic effect in association with the required pharmaceutical vehicle. The specification for the dosage unit forms of the invention are dictated by and directly dependent on (a) the unique characteristics of the therapeutic agent and the particular therapeutic effect to be achieved, and (b) the limitations inherent in the art of compounding such a compound of the invention for the treatment of the disease.

[0086] Methods of Treatment:

[0087] In certain embodiments of the methods described herein, the composition is suitable for treating, preventing, ameliorating and/or inhibiting a disease or malady selected from the group of: cytokine storm, Systemic Lupus Erythematous (SLE), psoriasis, eczema, seborrheic dermatitis, actinic keratosis, glomerulonephritis, SjOgren's syndrome, systemic inflammatory syndrome (SIRS, e.g. sepsis with and without documented pathogen), macrophage activation syndrome (MAS), severe acute respiratory syndrome (SARS), hantavirus pulmonary syndrome, disseminated vascular coagulopathy (DIC), glomerulonephritis, diabetes (Type 1 and 2), traumatic brain injury, transplant, graft vs. host disease, liver fibrosis, pulmonary fibrosis, chronic obstructive pulmonary disease, asthma, influenza, human immunodeficiency virus (HIV) infection, hepatitis infection, viral pneumonia, rheumatoid arthritis, acute lung injury, crush injury, traumatic injury, bone fracture, metabolic syndrome, atherosclerosis, Addison's Disease, pheochromocytoma, metastasis, hyperacute insect sting, anaphylaxis, necrosis associated with flesh-eating bacterial infection, kidney fibrosis, lupus nephritis, radiation therapy, frostbite, ischemia, reperfusion, myocardial infarction, myocarditis, bacterial pneumonia, bacterial sepsis, COVID-19 and Legionnaires disease. In other embodiments, methods are provided for treating, preventing, alleviating, stabilizing the inflammatory response mediated by endosomal TLR activation. Also provided herein, is a method of treating, preventing or delaying the onset of cytokine storm in an individual suspected or at risk of developing septic shock, the method comprising administering to the individual a prophylactically effective amount of a pharmaceutical composition of the invention.

[0088] As used herein, the phrase “cytokine storm” refers to an excessively activated cytokine cascade or hypercytokinemia, i.e., an excessive or uncontrolled release of proinflammatory cytokines, which can be associated with a wide variety of infectious and noninfectious diseases or disorders. Cytokine storm syndromes are a group of disorders (such as, but not limited to, influenza, asthma, hantavirus pulmonary syndrome. SIRS, MAS, SARS, COVID-19 and DIC, as described above), representing a variety of inflammatory causes; the present invention does not depend on any particular one of these underlying causes, but is directed to preventing or delaying the onset of cytokine storm, or treating cytokine storm, arising from any underlying inflammatory cause. Typically, the primary symptoms of a cytokine storm are high fever, swelling and redness, extreme fatigue and nausea. In some cases, the immune reaction can result in bleeding, clotting, internal organ injury, or shock, and may be fatal.

[0089] As used herein, the phrase “inflammatory response” or “pro-inflammatory response” or grammatical variations thereof, refers to an immune response by an animal or human body to infection, injury, or to autoimmunity or chronic immune activation, which response is typically characterized by pain, heat (localized warmth or fever), redness, swelling, and/or loss of normal function, in alocalized area of the body or more generally. Included in “inflammatory response” is acute inflammation, which lasts only a few days, and chronic inflammation, which can last weeks, months, or years, and may be relapsing.

[0090] The terms “treatment” or “treating” of a subject includes the application or administration of an effective amount of a pharmaceutical composition of the invention to a subject (or application or administration of a compound or pharmaceutical composition of the invention to a cell or tissue from a subject) with the purpose of stabilizing, curing, healing, alleviating, relieving, altering, remedying, less worsening, ameliorating, improving, or affecting the disease or condition, the symptom of the disease or condition, or the risk of (or susceptibility to) the disease or condition. The term “treating” refers to any indicia of success in the treatment or amelioration of an injury, pathology or condition, including any objective or subjective parameter such as abatement; remission; lessening of the rate of worsening; stabilization, diminishing of symptoms or making the injury, pathology or condition more tolerable to the subject; slowing in the rate of degeneration or decline; making the final point of degeneration less debilitating; or improving a subject's physical or mental well-being. In an embodiment, the term “treating” can include increasing a subjec's life expectancy.

[0091] As used herein an “effective amount” of a compound or composition for treating a particular disease, such as those caused by an untoward inflammatory response, including cytokine storm, and the like, is an amount that is sufficient to ameliorate, or In some manner reduce the symptoms associated with the disease. Such amount can be administered as a single dosage or can be administered according to a regimen, whereby it is effective. The amount can cure the disease but, in certain embodiments, is administered in order to ameliorate the symptoms of the disease. In particular embodiments, repeated administration is required to achieve a desired amelioration of symptoms. A “therapeutically effective amount” or “herapeutically effective dose” can refer to an agent, compound, material, or composition containing a compound, such as an engineered extracellular vesicle as described herein, that is at least sufficient to produce a therapeutic effect. An effective amount is the quantity of a therapeutic agent necessary for preventing, curing, ameliorating, arresting or partially arresting a symptom of a disease or disorder.

[0092] As used herein, ‘patient or’subject to be treated includes humans and or non-human animals, including mammals. Mammals include primates, such as humans, chimpanzees, gorillas and monkeys; and domesticated animals.

[0093] Also provided is a method for delivering a therapeutic molecule to an individual in need thereof, the method comprising: (1) harvesting exosomes from a cultured packaging cell line, wherein the packaging cell line comprises an expression vector encoding a fusion protein: and (2) administering an engineered exosomes harvested in step (1) to an individual in need thereof.

[0094] Also provided herein, is an exosome-based delivery system for delivering a therapeutic molecule, wherein said delivery system comprises a fusion protein comprising an anti-TLR antibody fused with a tetraspanin, wherein said tetraspanin is positioned at the surface of an exosome, and wherein said tetraspanin is capable of binding to a target on recipient cell. The tetraspanin member of the tetraspanin family of proteins is selected from the group consisting of: TSPAN1, TSPAN2, TSPAN3, TSPAN4, TSPAN5, TSPAN6, TSPAN7, TSPAN8, TSPAN9, TSPAN10, TSPAN11, TSPAN12, TSPAN13, TSPAN14, TSPAN15, TSPAN16, TSPAN17, TSPAN18, TSPAN19, TSPAN20 (uroplakin 18), TSPAN21(uroplakin1A) TSPAN22 (peripherin2), TSPAN23 (retinal outer segment membrane protein1), TSPAN24 (CD151), TSPAN25 (CD53), TSPAN26 (CD37), TSPAN27 (CD82), TSPAN28 (CD81), TSPAN29 (CD9), TSPAN30 (CD63), TSPAN31, TSPAN32, TSPAN33, and TSPAN34.

[0095] Fusion Proteins:

[0096] Also provided, is a fusion protein comprising a tetraspanin, or a functional fragment thereof, linked to an anti-TLR antibody, or a functional fragment thereof, wherein the anti-TLR antibody inhibits an endosomal TLR activity. In particular embodiments, the tetraspanin is selected from the group consisting of TSPAN1, TSPAN2, TSPAN3, TSPAN4, TSPAN5, TSPAN6, TSPAN7, TSPAN8, TSPAN9, TSPAN10, TSPAN11, TSPAN12, TSPAN13, TSPAN14, TSPAN15, TSPAN16, TSPAN17, TSPAN18, TSPAN19, TSPAN20 (uroplakin 1B), TSPAN21 (uroplakin1A) TSPAN22 (perpherin2), TSPAN23 (retinal outer segment membrane protein1), TSPAN24 (CD151), TSPAN25 (CD53), TSPAN26 (CD37), TSPAN27 (CD82), TSPAN28 (CD81), TSPAN29 (CD9), TSPAN30 (CD63), TSPAN31, TSPAN32, TSPAN33, TSPAN34; and the anti-TLR antibody specifically binds a toll-like receptor selected from the group consisting of TLR2, TLR3, TLR4, TLR5, TLR6, TLR7, TLR8, and TLR9. In some embodiments, the tetraspanin is TSPAN30 (CD63). In some embodiments, the anti-TLR antibody, or functional fragment thereof, inhibits the binding of an endosomal TLR to a ligand of the TLR. In other embodiments, the anti-TLR antibody, or functional fragment thereof, inhibits dimerization of an endosomal TLR. In particular embodiments, the fusion protein comprises a peptidyl linker comprising a cleavage site of protease/endopeptidase. In certain embodiments, the cleavage site is recognized by a protease/endopeptidase selected from the group consisting of cathepsin B, cathepsin H, cathepsin K, cathepsin L, cathepsin S, asparagine endopeptidase, and furin-like protease.

[0097] In some embodiments, the fusion proteins can be selected from the group of fusion proteins set forth in Table 3 that have an anti-TLR antibody, or a functional fragment thereof therein. In other embodiments, the fusion protein can comprise a tetraspanin, or a functional fragment thereof, linked to a functional moiety, wherein said fusion protein is selected from the group of fusion proteins set forth in Table 3.

[0098] The term “fusion protein,” indicates that the protein includes polypeptide components derived from more than one parental protein or polypeptide, for example, a tetraspanin (or a functional fragment thereof) and an anti-TLR antibody (or functional fragment thereof). Typically, a fusion protein is expressed from a “fusion gene” in which a nucleotide sequence encoding a polypeptide sequence from one protein is appended in frame with (optionally separated by a gene sequence encoding a peptidyl linker) a nucleotide sequence encoding a polypeptide sequence from a different protein. The fusion gene can then be expressed by a recombinant host cell as a single protein.

[0099] “Polypeptide” and “protein” are used interchangeably herein and include a molecular chain of two or more amino acids linked covalently through peptide bonds. The terms do not refer to a specific length of the product. Thus. “peptides,” and “oligopeptides,” are included within the definition of polypeptide. The terms include post-translational modifications of the polypeptide, for example, glycosylations, acetylations, phosphorylations and the like. In addition, protein fragments, analogs, mutated or variant proteins, fusion proteins and the like are Included within the meaning of polypeptide. The terms also include molecules in which one or more amino acid analogs or non-canonical or unnatural amino acids are included as can be expressed recombinantly using known protein engineering techniques. In addition, fusion proteins can be derivatized as described herein by well-known organic chemistry techniques.

[0100] A “variant” of a polypeptide (e.g., an immunoglobulin, or an antibody) comprises an amino acid sequence wherein one or more amino acid residues are inserted into, deleted from and/or substituted into the amino acid sequence relative to another polypeptide sequence. Variants include variant fusion proteins.

[0101] The fusion protein for use in accordance with the invention is typically produced by recombinant expression technology. The term “recombinant” indicates that the material (e.g., a nucleic acid or a polypeptide) has been artificially or synthetically (i.e., non-naturally) altered by human intervention. The alteration can be performed on the material within, or removed from, its natural environment or state. For example, a “recombinant nucleic acid” is one that is made by recombining nucleic acids, e.g., duing cloning, DNA shuffling or other well-known molecular biological procedures. Examples of such molecular biological procedures are found in Maniatis et al., Molecular Cloning. A Laboratory Manual. Cold Spring Harbor Laboratory, Cold Spring Harbor. N.Y. (1982). A “recombinant DNA molecule,” is comprised of segments of DNA joined together by means of such molecular biological techniques.

[0102] Cloning of DNA is carried out using standard techniques (see, e.g., Sambrook et al. (1989) Molecular Cloning: A Laboratory Guide, Vols 1-3, Cold Spring Harbor Press, which Is incorporated herein by reference). For example, a cDNA library may be constructed by reverse transcription of polyA+mRNA, preferably membrane-associated mRNA, and the library screened using probes specific for human immunoglobulin polypeptide gene sequences. In some embodiments, however, the polymerase chain reaction (PCR) is used to amplify cDNAs (or portions of full-length cDNAs) encoding an immunoglobulin gene segment of interest (e.g., alight or heavy chain variable segment). The amplified sequences can be readily cloned into any suitable vector, e.g., expression vectors, minigene vectors, or phage display vectors. It will be appreciated that the particular method of cloning used is not critical, so long as it is possible to determine the sequence of some portion of the polypeptide of interest, e.g., a portion of the fusion protein sequence.

[0103] One source for antibody nucleic acids is a hybridoma produced by obtaining a B cell from an animal immunized with the antigen of interest and fusing it to an immortal cell. Alternatively, nucleic acid can be isolated from B cells (or whole spleen) of the immunized animal. Yet another source of nucleic acids encoding antibodies is a library of such nucleic acids generated, for example, through phage display technology. Polynucleotides encoding peptides of interest, e.g., variable region peptides with desired binding characteristics, can be identified by standard techniques such as panning.

[0104] Sequencing of DNA is carried out using standard techniques (see, e.g., Sambrook et al. (1989) Molecular Cloning: A Laboratory Guide, Vols 1-3, Cold Spring Harbor Press, and Sanger, F. et al. (1977) Proc. Natl. Aced. Sci. USA 74: 5463-5467, which is incorporated herein by reference). By comparing the sequence of the cloned nucleic acid with published sequences of genes and cDNAs, one of skill will readily be able to determine, depending on the region sequenced. One source of gene sequence information is the National Center for Biotechnology Information, National Library of Medicine, National Institutes of Health, Bethesda, Md.

[0105] The term “identity” of a sequence refers to a relationship between the sequences of two or more polypeptide molecules or two or more nucleic acid molecules, as determined by aligning and comparing the sequences. “Percent identity” means the percent of identical residues between the amino acids or nucleotides in the compared molecules and is calculated based on the size of the smallest of the molecules being compared. For these calculations, gaps in alignments (if any) must be addressed by a particular mathematical model or computer program (i.e., an “algorithm”). Methods that can be used to calculate the identity of the aligned nucleic acids or polypeptides include those described in Computational Molecular Biology, (Lesk, A. M., ed.), 1988, New York: Oxford University Press; Biocomputing Informatics and Genome Projects, (Smith, D. W., ed.), 1993, New York: Academic Press; Computer Analysis of Sequence Data, Part I, (Griffin, A. M., and Griffin, H. G., eds.), 1994, New Jersey: Humana Press; von Heinje. G., 1987. Sequence Analysis in Molecular Biology, New York: Academic Press; Sequence Analysis Primer, (Gribskov, M. and Devereux, J., eds.), 1991, New York: M. Stockton Press: and Carillo et al., 1988, SIAM J. Applied Math. 48:1073. For example, sequence identity can be determined by standard methods that are commonly used to compare the similarity in position of the amino acids of two polypeptides. Using a computer program such as BLAST or FASTA, two polypeptide or two polynucleotide sequences are aligned or optimal matching of their respective residues (either along the full length of one or both sequences, or along a pre-determined portion of one or both sequences). The programs provide a default opening penalty and a default gap penalty, and a scoring matrix such as PAM 250 [a standard scoring matrix: see Dayhoff et al., in Atlas of Protein Sequence and Structure, vol. 5. supp. 3 (1978)] can be used in conjunction with the computer program. For example, the percent identity can then be calculated as: the total number of identical matches multiplied by 100 and then divided by the sum of the length of the longer sequence within the matched span and the number of gaps introduced into the longer sequences in order to align the two sequences. In calculating percent identity, the sequences being compared are aligned in a way that gives the largest match between the sequences.

[0106] The GCG program package is a computer program that can be used to determine percent identity, which package includes GAP (Devereux et al., 1984, Nucl. Acid Res. 12; 387; Genetics Computer Group, University of Wisconsin, Madison, Wis.). The computer algorithm GAP Is used to align the two polypeptides or two polynucleotides for which the percent sequence identity is to be determined. The sequences are aligned for optimal matching of their respective amino acid or nucleotide (the “matched span,” as determined by the algorithm). A gap opening penalty (which is calculated as 3×the average diagonal, wherein the “average diagonal” is the average of the diagonal of the comparison matrix being used; the “diagonal” is the score or number assigned to each perfect amino acid match by the particular comparison matrix) and a gap extension penalty (which is usually 1/10 times the gap opening penalty), as well as a comparison matrix such as PAM 250 or BLOSUM 62 are used in conjunction with the algorithm. In certain embodiments, a standard comparison matrix (see, Dayhoff et al., 1978, Atlas of Protein Sequence and Structure 5:345-352 for the PAM 250 comparison matrix; Henikoff et al., 1992, Proc. Natl. Acad. Sci. U.S.A. 89:10915-10919 for the BLOSUM 62 comparison matrix) is also used by the algorithm

[0107] Recommended parameters for determining percent identity for polypeptides or nucleotide sequences using the GAP program include the following: Algorithm: Needleman et al., 1970, J. Mol. Bio. 48:443-453; Comparison matrix: BLOSUM 82 from Henikoff et al., 1992, supra; Gap Penalty: 12 (but with no penalty for end gaps) Gap Length Penalty: 4 Threshold of Similarity: 0

[0108] Certain alignment schemes for aligning two amino acid sequences may result in matching of only a short region of the two sequences, and this small aligned region may have very high sequence identity even though there is no significant relationship between the two full-length sequences. Accordingly, the selected alignment method (GAP program) can be adjusted if so desired to result in an alignment that spans at least 50 contiguous amino acids of the target polypeptide.

[0109] The term “modification” when used in connection with proteins of interest, include, but are not limited to, one or more amino acid changes (including substitutions, insertions or deletions); chemical modifications; covalent modification by conjugation to therapeutic or diagnostic agents; labeling (e.g., with radionuclides or various enzymes); covalent polymer attachment such as PEGylation (derivatization with polyethylene glycol) and insertion or substitution by chemical synthesis of non-natural amino acids. By methods known to the skilled artisan, proteins, can be engineered or modified for Improved target affinity, selectivity, stability, and/or manufacturability before the coding sequence of the engineered protein is included in the expression cassette.

[0110] Isolated DNA can be operably linked to control sequences or placed into expression vectors, which are then transfected into host cells that do not otherwise produce immunoglobulin protein, to direct the synthesis of monoclonal antibodies in the recombinant host cells. Recombinant production of antibodies is well known in the art.

[0111] Nucleic acid is operably linked when it is placed into a functional relationship with another nucleic acid sequence. For example, DNA for a presequence or secretory leader is operably linked to DNA for a polypeptide if it is expressed as a preprotein that participates in the secretion of the polypeptide; a promoter or enhancer is operably linked to a coding sequence if it affects the transcription of the sequence; or a ribosome binding site is operably linked to a coding sequence if it is positioned so as to facilitate translation. Generally, operably linked means that the DNA sequences being linked are contiguous, and, in the case of a secretory leader, contiguous and in reading phase. However, enhancers do not have to be contiguous. Linking is accomplished by ligation at convenient restriction sites. If such sites do not exist, the synthetic oligonucleotide adaptors or linkers are used in accordance with conventional practice.

[0112] Many vectors are known in the art. Vector components may include one or more of the following: a signal sequence (that may, for example, direct secretion of the expressed protein; an origin of replication, one or more selective marker genes (that may, for example, confer antibiotic or other drug resistance, complement auxotrophic deficiencies, or supply critical nutrients not available in the media), an enhancer element, a promoter, and a transcription termination sequence, all of which are known in the art.

[0113] The term “recombinant protein” or “recombinant polypeptide.” as used herein, refers to a protein molecule which is expressed using a recombinant DNA molecule. A “recombinant host cell” is a cell that contains and/or expresses a recombinant nucleic acid. Recombinant DNA molecules useful in expressing the fusion protein are described, e.g., by Papadopoulos et al., Modified Chimeric Polypeptides with Improved Pharmacokinetic Properties, U.S. Pat. No. 7,070,959 B2; and WO 00/75319 A1).

[0114] The term “naturally occurring,” where it occurs in the specification in connection with biological materials such as polypeptides, nucleic acids, host cells, and the like, refers to materials which are found in nature.

[0115] The term “control sequence” or “control signal” refers to a polynucleotide sequence that can, in a particular host cell, affect the expression and processing of coding sequences to which it is ligated. The nature of such control sequences may depend upon the host organism. In particular embodiments, control sequences for prokaryotes may include a promoter, a ribosomal binding site, and a transcription termination sequence. Control sequences for eukaryotes may include promoters comprising one or a plurality of recognition sites for transcription factors, transcription enhancer sequences or elements, polyadenylation sites, and transcription termination sequences. Control sequences can include leader sequences and/or fusion partner sequences. Promoters and enhancers consist of short arrays of DNA that interact specifically with cellular proteins involved in transcription (Maniatis, et al., Science 236:1237 (1987)). Promoter and enhancer elements have been isolated from a variety of eukaryotic sources including genes in yeast, insect and mammalian cells and viruses (analogous control elements, i.e., promoters, are also found in prokaryotes). The selection of a particular promoter and enhancer depends on what cell type is to be used to express the protein of interest. Some eukaryotic promoters and enhancers have a broad host range while others are functional in a limited subset of cell types (for review, see Voss, et al., Trends Biochem. Sci., 11:287 (1986) and Maniatis, et al., Science 236:1237 (1987)).

[0116] A “promoter” is a region of DNA including a site at which RNA polymerase binds to initiate transcription of messenger RNA by one or more downstream structural genes. Promoters are located near the transcription start sites of genes, on the same strand and upstream on the DNA (towards the 5′ region of the sense strand). Promoters are typically about 100-1000 bp in length.

[0117] An “enhancer” is a short (50-1500 bp) region of DNA that can be bound with one or more activator proteins (transcription factors) to activate transcription of a gene.

[0118] The terms “in operable combination,” “in operable order.” and “operably linked” as used herein refer to the linkage of nucleic acid sequences in such a manner that a nucleic acid molecule capable of directing the transcription of a given gene and/or the synthesis of a desired protein molecule is produced. The term also refers to the linkage of amino acid sequences in such a manner so that a functional protein is produced. For example, a control sequence in a vector that is “operably linked” to a protein coding sequence is ligated thereto so that expression of the protein coding sequence is achieved under conditions compatible with the transcriptional activity of the control sequences.

[0119] A “secreted” protein refers to those proteins capable of being directed to the endoplasmic reticulum (ER), secretory vesicles, or the extracellular space as a result of a secretory signal peptide sequence, as well as those proteins released into the extracellular space without necessarily containing a signal sequence. If the secreted protein is released into the extracellular space, the secreted protein can undergo extracellular processing to produce a “mature” protein. Release into the extracellular space can occur by many mechanisms, including exocytosis and proteolytic cleavage. In some other embodiments, the fusion protein of interest can be synthesized by the host cell as a secreted protein, which can then be further purified from the extracellular space and/or medium.

[0120] As used herein “soluble” when in reference to a protein produced by recombinant DNA technology in a host cell is a protein that exists in aqueous solution; if the protein contains a twin-arginine signal amino acid sequence the soluble protein is exported to the periplasmic space in gram negative bacterial hosts, or is secreted into the culture medium by eukaryotic host cells capable of secretion, or by bacterial host possessing the appropriate genes (e.g., the kil gene). Thus, a soluble protein is a protein which is not found in an inclusion body inside the host cell. Alternatively, depending on the context, a soluble protein is a protein which is not found integrated in cellular membranes, or, in vitro, is dissolved, or is capable of being dissolved in an aqueous buffer under physiological conditions without forming significant amounts of insoluble aggregates (i.e., forms aggregates less than 10%, and typically less than about 5%, of total protein) when it is suspended without other proteins in an aqueous buffer of interest under physiological conditions, such buffer not containing an ionic detergent or chaotropic agent, such as sodium dodecyl sulfate (SDS), urea, guanidinium hydrochloride, or lithium perchlorate. In contrast, an insoluble protein is one which exists in denatured form inside cytoplasmic granules (called an inclusion body) in the host cell, or again depending on the context, an insoluble protein is one which is present in cell membranes, including but not limited to, cytoplasmic membranes, mitochondrial membranes, chloroplast membranes, endoplasmic reticulum membranes, etc., or in an in vitro aqueous buffer under physiological conditions forms significant amounts of insoluble aggregates (i.e., forms aggregates equal to or more than about 10% of total protein) when it is suspended without other proteins (at physiologically compatible temperature) in an aqueous buffer of interest under physiological conditions, such buffer not containing an ionic detergent or chaotropic agent, such as sodium dodecyl sulfate (SDS), urea, guanidinium hydrochloride, or lithium perchlorate.

[0121] The term “polynucleotide” or “nucleic acid” includes both single-stranded and double-stranded nucleotide polymers containing two or more nucleotide residues. The nucleotide residues comprising the polynucleotide can be ribonucleotides or deoxyribonucleotides or a modified form of either type of nucleotide. Said modifications include base modifications such as bromouridine and inosine derivatives, ribose modifications such as 2,3′-dideoxyribose, and internucleotide linkage modifications such as phosphorothioate, phosphorodithioate, phosphoroselenoate, phosphorodiselenoate, phosphoroanilothioate, phoshoraniladate and phosphoroamidate.

[0122] The term “oligonucleotide” means a polynucleotide comprising 200 or fewer nucleotide residues. In some embodiments, oligonucleotides are 10 to 60 bases in length. In other embodiments, oligonucleotides are 12, 13, 14, 15, 16, 17, 18, 19, or 20 to 40 nucleotides in length. Oligonucleotides may be single stranded or double stranded, e.g., for use in the construction of a mutant gene. Oligonucleotides may be sense or antisense oligonucleotides. An oligonucleotide can include a label, including a radiolabel, a fluorescent label, a hapten or an antigenic label, for detection assays. Oligonucleotides may be used, for example, as PCR primers, cloning primers or hybridization probes.

[0123] A “polynucleotide sequence” or “nucleotide sequence” or “nucleic acid sequence,” as used interchangeably herein, is the primary sequence of nucleotide residues in a polynucleotide, including of an oligonucleotide, a DNA, and RNA, a nucleic acid, or a character string representing the primary sequence of nucleotide residues, depending on context. From any specified polynucleotide sequence, either the given nucleic acid or the complementary polynucleotide sequence can be determined. Included are DNA or RNA of genomic or synthetic origin which may be single- or double-stranded, and represent the sense or antisense strand. Unless specified otherwise, the left-hand end of any single-stranded polynucleotide sequence discussed herein Is the 5′ end; the left-hand direction of double-stranded polynucleotide sequences is referred to as the 5′ direction. The direction of 5′ to 3′ addition of nascent RNA transcripts is referred to as the transcription direction; sequence regions on the DNA strand having the same sequence as the RNA transcript that are 5′ to the 5′ end of the RNA transcript are referred to as “upstream sequences”; sequence regions on the DNA strand having the same sequence as the RNA transcript that are 3′ to the 3′ end of the RNA transcript are referred to as “downstream sequences.”

[0124] As used herein, an “isolated nucleic acid molecule” or “isolated nucleic acid sequence” is a nucleic acid molecule that is either (1) identified and separated from at least one contaminant nucleic acid molecule with which it is ordinarily associated in the natural source of the nucleic acid or (2) cloned, amplified, tagged, or otherwise distinguished from background nucleic acids such that the sequence of the nucleic acid of interest can be determined. An isolated nucleic acid molecule is other than in the form or setting in which it Is found in nature. However, an isolated nucleic acid molecule includes a nucleic acid molecule contained in cells that ordinarily express the immunoglobulin (e.g., antibody) where, for example, the nucleic acid molecule is in a chromosomal location different from that of natural cells.

[0125] As used herein, the terms nucleic acid molecule encoding, “DNA sequence encoding,” and “DNA encoding” refer to the order or sequence of deoxyribonucleotides along a strand of deoxyribonucleic acid. The order of these deoxyribonucleotides determines the order of ribonucleotides along the mRNA chain, and also determines the order of amino acids along the polypeptide (protein) chain. The DNA sequence thus codes for the RNA sequence and for the amino acid sequence.

[0126] The term “gene” is used broadly to refer to any nucleic acid associated with a biological function. Genes typically include coding sequences and/or the regulatory sequences required for expression of such coding sequences. The term “gene” applies to a specific genomic or recombinant sequence, as well as to a cDNA or mRNA encoded by that sequence. Genes also include non-expressed nucleic acid segments that, for example, form recognition sequences for other proteins. Non-expressed regulatory sequences including transcriptional control elements to which regulatory proteins, such as transcription factors, bind, resulting in transcription of adjacent or nearby sequences.

[0127] “Expression of a gene” or “expression of a nucleic acid” means transcription of DNA into RNA (optionally including modification of the RNA, e.g., splicing), translation of RNA into a polypeptide (possibly Including subsequent post-translational modification of the polypeptide), or both transcription and translation, as indicated by the context.

[0128] An expression cassette is atypical feature of recombinant expression technology. The expression cassette includes a gene encoding a protein of interest e.g., a gene encoding the fusion protein sequence. A eukaryotic “expression cassette” refers to the part of an expression vector that enables production of protein in a eukaryotic cell, such as a mammalian cell. It includes a promoter, operable in a eukaryotic cell, for mRNA transcription, one or more gene(s) encoding protein(s) of interest and a mRNA termination and processing signal. An expression cassette can usefully include among the coding sequences, a gene useful as a selective marker. In the expression cassette promoter is operably linked 5′ to an open reading frame encoding an exogenous protein of interest; and a polyadenylation site is operably linked 3′ to the open reading frame. Other suitable control sequences can also be included as long as the expression cassette remains operable. The open reading frame can optionally include a coding sequence for more than one protein of interest.

[0129] As used herein the term “coding region” or “coding sequence” when used in reference to a structural gene refers to the nucleotide sequences which encode the amino acids found in the nascent polypeptide as a result of translation of an mRNA molecule.

[0130] The coding region is bounded, in eukaryotes, on the 5′ side by the nucleotide triplet “ATG” which encodes the initiator methionine and on the 3′ side by one of the three triplets which specify stop codons (i.e., TAA, TAG, TGA).

[0131] Recombinant expression technology typically involves the use of a recombinant expression vector comprising an expression cassette and a mammalian host cell comprising the recombinant expression vector with the expression cassette or at least the expression cassette, which may for example, be integrated into the host cell genome.

[0132] The term “vector” means any molecule or entity (e.g., nucleic acid, plasmid, bacteriophage or virus) used to transfer protein coding information into a host cell.

[0133] The term “expression vector” or “expression construct” as used herein refers to a recombinant DNA molecule containing a desired coding sequence and appropriate nucleic acid control sequences necessary for the expression of the operably linked coding sequence in a particular host cell. An expression vector can include, but is not limited to, sequences that affect or control transcription, translation, and, if introns are present, affect RNA splicing of a coding region operably linked thereto. Nucleic acid sequences necessary for expression in prokaryotes include a promoter, optionally an operator sequence, a ribosome binding site and possibly other sequences. Eukaryotic cells are known to utilize promoters, enhancers, and termination and polyadenylation signals. A secretory signal peptide sequence can also, optionally, be encoded by the expression vector, operably linked to the coding sequence of interest, so that the expressed polypeptide can be secreted by the recombinant host cell, for more facile isolation of the polypeptide of interest from the cell, if desired. Such techniques are well known in the art. (See, e.g., Goodey, Andrew R.; et al., Peptide and DNA sequences, U.S. Pat. No. 5,302,697: Weiner at al., Compositions and methods for protein secretion, U.S. Pat. Nos. 6,022,952 and 6,335,178; Uemura et al., Protein expression vector and utilization thereof, U.S. Pat. No. 7,029,909; Ruben et al., 27 human secreted proteins, US 2003/0104400 A1). For expression of multi-subunit proteins of interest, separate expression vectors in suitable numbers and proportions, each containing a coding sequence for each of the different subunit monomers, can be used to transform a host cell. In other embodiments, a single expression vector can be used to express the different subunits of a protein of interest.

[0134] The term “host cell” means a cell that has been transformed, or is capable of being transformed, with a nucleic acid and thereby expresses a gene or coding sequence of interest.

[0135] The term includes the progeny of the parent cell, whether or not the progeny is identical in morphology or in genetic make-up to the original parent cell, so long as the gene of interest is present. Any of a large number of available and well-known host cells may be used in the practice of this invention to obtain the fusion protein, although mammalian host cells capable of post-translational glycosylation may be preferred for some embodiments. The selection of a particular host is dependent upon a number of factors recognized by the art. These include, for example, compatibility with the chosen expression vector, toxicity of the peptides encoded by the DNA molecule, rate of transformation, ease of recovery of the peptides, expression characteristics, bio-safety and costs. A balance of these factors must be struck with the understanding that not all hosts may be equally effective for the expression of a particular DNA sequence. Modifications can be made at the DNA level, as well. The peptide-encoding DNA sequence may be changed to codons more compatible with the chosen host cell. Codons can be substituted to eliminate restriction sites or to include silent restriction sites, which may aid in processing of the DNA in the selected host cell. Next, the transformed host is cultured and purified. Host cells may be cultured under conventional fermentation conditions so that the desired compounds are expressed. Such fermentation conditions are well known in the art.

[0136] Within these general guidelines, microbial host cells in culture, such as bacteria (such as Escheilchia coli sp.), and yeast cell lines (e.g., Saccharomyes, Pichia, Schizosaccharomyces, Kluyveromyces) and other fungal cells, algal or algal-like cells, insect cells, plant cells, that have been modified to incorporate humanized glycosylation pathways, can also be used to produce functional glycosylated fusion protein, if desired. However, mammalian (including human) host cells, e.g., CHO cells and HEK-293 cells, are particularly useful.

[0137] Examples of useful mammalian host cell lines are Chinese hamster ovary cells, including CHO-K1 cells (e.g., ATCC CCL61), DXB-11, DG-44, and Chinese hamster ovary cells/-DHFR (CHO, Udaub et al, Proc. Natl. Acad. Sci. USA 77: 4216 (1980)); monkey kidney CVI line transformed by SV40 (COS-7, ATCC CRL 1651); human embryonic kidney line (293 or 293 cells subcloned for growth in suspension culture (Graham et al, J. Gen Viol. 36: 59 (1977)); baby hamster kidney cells (BHK, ATCC CCL 10); mouse Sertoli cells (TM4, Mather, Bid. Reprod. 23: 243-251 (1980)); monkey kidney cells (CVI ATCC CCL 70); African green monkey kidney cells (VERO-76, ATCC CRL-1587); human cervical carcinoma cells (HELA, ATCC CCL 2); canine kidney cells (MDCK, ATCC CCL 34); buffalo rat liver cells (BRL 3A, ATCC CRL 1442); human lung cells (W138, ATCC CCL 75); human hepatoma cells (Hep G2, HB 8065); mouse mammary tumor (MMT 060562, ATCC CCL51); TRI cells (Mather et al., Annals N.Y Acad. Sci. 383:44-68 (1982)); MRC 5 cells or FS4 cells; or mammalian myeloma cells, e.g., NS0 or sp2/0 mouse myeloma cells.

[0138] “Cell,” “cell line,” and “cell culture” are often used interchangeably and all such designations herein include cellular progeny. For example, a cell “derived” from a CHO cell is a cellular progeny of a Chinese Hamster Ovary cell, which may be removed from the original primary cell parent by any number of generations, and which can also include a transformant progeny cel.

[0139] Transformants and transformed cells include the primary subject cell and cultures derived therefrom without regard for the number of transfers. It Is also understood that all progeny may not be precisely identical in DNA content, due to deliberate or inadvertent mutations. Mutant progeny that have the same function or biological activity as screened for in the originally transformed cell are included.

[0140] Host cells are transformed or transected with the above-described nucleic acids or vectors for production of polypeptides (including antigen binding proteins, such as antibodies) and are cultured in conventional nutrient media modified as appropriate for inducing promoters, selecting transformants, or amplifying the genes encoding the desired sequences. In addition, novel vectors and transfected cell lines with multiple copies of transcription units separated by a selective marker are particularly useful for the expression of polypeptides, such as antibodies.

[0141] The term “transfection” means the uptake of foreign or exogenous DNA by a cell, and a cell has been “transfected” when the exogenous DNA has been introduced inside the cell membrane. A number of transfection techniques are well known in the art and are disclosed herein. See, e.g., Graham et al., 1973, Virology 52:456; Sambrook et al., 2001, Molecular Cloning: A Laboratory Manual, supra; Davis et al., 1986, Basic Methods in Molecular Biology, Elsevier; Chu et al., 1981, Gene 13:197. Such techniques can be used to introduce one or more exogenous DNA moieties into suitable host calls.

[0142] The term “transformation” refers to a change in a cell's genetic characteristics, and a cell has been transformed when it has been modified to contain new DNA or RNA. For example, a cell is transformed where it is genetically modified from its native state by introducing new genetic material via transfection, transduction, or other techniques. Following transfection or transduction, the transforming DNA may recombine with that of the cell by physically Integrating into a chromosome of the cell, or may be maintained transiently as an episomal element without being replicated, or may replicate independently as a plasmid. A cell is considered to have been “stably transformed” when the transforming DNA is replicated with the division of the cell.

[0143] The term “linked” or “linker,” in the context of the tetraspanin and anti-TLR antibody complex of the invention, refers to any mechanistic, chemical, or recombinant approach, such as using a fusion protein, for attaching a polypeptide having TLR-specific binding activity under physiological conditions with a tetraspanin peptide, polypeptide, or protein. As used herein, the phrase “fused” or “fusion,” or grammatical variations thereof, refers to two or more polypeptide moieties or domains that are covalently linked, directly or indirectly (e.g., via an intervening amino acid sequence), which polypeptide moieties or domains do not naturally occur in the same molecule. The “fusion” of the second polypeptide moiety to the first polypeptide moiety can be a direct fusion of the sequences, with the second peptide directly adjacent to the first peptide, or it may be an indirect fusion, e.g., with intervening amino acid sequence such as a cleavable linker, an identifier or epitope tag sequence, a domain, a functional peptide, or a larger polypeptide or protein. In some embodiments, the fused polypeptides are expressed from a gene that codes for both of them so that upon expression of the gene, the polypeptides are part of the same protein (e.g., a fusion protein). In other embodiments, the two peptides may be linked following co-expression in a recombinant host cell, using high affinity binding sequences between the two peptides, such as biotin and avidin or strepavidin. In yet other examples, the two peptides are linked following expression and purification of each polypeptide, after which they are synthetically tethered together, perhaps by linking the C-terminus of the first polypeptide to the N-terminus of the other polypeptide.

[0144] In certain embodiments, the anti-TLR antibody (or functional fragment thereof) is fused to the tetraspanin (or functional fragment thereof), with a linker that is susceptible to cleavage by proteases/endopeptidases activated in an acidic environment in the endosome, yielding free payload in the endosomal compartment. Such proteases/endopeptidases include, but are not limited to cathepsin, cathepsin H, cathepsin K, cathepsin L, or cathepsin S; or other endopeptidases e.g. asparagine endopeptidase. Amino acid residues constituting cleavage target sites of such proteases or endopeptidases are known in the art and can be incorporated into the linker sequence employed. (See, e.g., Biniossek et al., Proteomic Identification of Protease Cleavage Sites Characterizes Prime and Non-prime Specificity of Cysteine Cathepsins B, L, and S, J. Proteome Res., 2011, 10 (12), pp 5363-6373 (2011) and Erratum in J. Proteome Res. 10(12):5577 (2011); Manoury et al., An asparaginyl endopeptidase processes a microbial antigen for class II MHC presentation, Nature 396: 695-699 (1998): Maschalidi et al., Asperagine Endopeptidase Controls Anti-Influenza Virus Immune Responses through TLR7 Activation, PLoS Pathogens 8(8):e1002841. doi.oro/10.1371Coumalowt1002841(2012); Sun et al., Proteolytic Characteristics of Cathepsin D Related to the Recognition and Cleavage of its Target Proteins, PLoS One 8(6): e65733. doi.oro/10.1371mioumal.one.0065733: Gikanga et al., Cathepsin B Cleavage of vcMMAE-Bsed Anhbody-Drug Conjugate s Not Drug Location or Monoclonal Antibody Carrier Specific, Bloconjugate Chem., 2016, 27 (4):1040-104 (2016); Yasothomsikul et al., Cathepsin L in secretory vesicles functions as a prohormone-processing enzyme for production of the enkephalin peptide neurotransmitter, Proc. Natl. Acad. Sci. (USA) 100 (16):9590-9595 (2003)).

[0145] In other embodiments, the linker's chemical structure is not critical, since it serves primarily as a spacer to position, join, connect, or optimize presentation or position of one functional moiety in relation to one or more other functional moieties of a molecule. The presence of a linker moiety can be useful in optimizing pharmacological activity of some embodiments of the invention. The linker is preferably made up of amino acids linked together by peptide bonds. The linker moiety, if present, can be independently the same or different from any other linker, or linkers, that may also be present in the fusion protein.

[0146] As stated above, the linker moiety, if present, can be “peptidyl” in nature (i.e., made up of amino acids linked together by peptide bonds) and made up in length, preferably, of from 1 up to about 40 amino acid residues, more preferably, of from 1 up to about 20 amino acid residues, and most preferably of from 1 to about 10 amino acid residues. Preferably, but not necessarily, the amino acid residues in the linker are from among the twenty canonical amino acids, more preferably, cysteine, glycine, alanine, proline, asparagine, glutamine, and/or serine. Even more preferably, a peptidyl linker Is made up of a majority of amino acids that are sterically unhindered, such as glycine, serine, and alanine linked by a peptide bond. It is also desirable that, if present, a peptidyl linker be selected that avoids rapid proteoytic turnover in circulation in vivo. Some of these amino acids may be glycosylated, as is well understood by those in the art. For example, a useful linker sequence constituting a sialylation site is X₁X₂NX₄X₅G, wherein X₁, X₂, X₄ and X₅ are each independently any amino acid residue.

[0147] In other embodiments, the 1 to 40 amino acids of the peptidy linker moiety are selected from glycine, alanine, proline, asparagine, glutamine, and lysine. Preferably, a linker is made up of a majority of amino acids that are satirically unhindered, such as glycine and alanine. Thus, preferred linkers include polyglycines, polyserines, and polyalanines, or combinations of any of these. Some exemplary peptidy linkers are poly(Gly)₁₋₈, particularly (Gly)3, (Gly)4, (Gly)5 and (Gly)7. Other specific examples of peptidy linkers include (Gly)5Lys, and (Gly)LysArg. Other examples of useful peptidyl linkers are: (Gly)3Lys(Gly)4; (Gly)3AsnGlySer(Giy)2; (Gly)3Cys(Gly)4; and GlyProAsnGlyGly. To explain the above nomenclature, for example, (Gly)3Lys(Gly)4 means Gly-Gly-Gly-Lys-Gly-Gly-Gly-Gly. Other combinations of Gly and Ala are also useful. Commonly used peptidyl linkers include GGGGS (SEQ ID NO:185); GGGGSGGGGS (SEQ ID NO: 186); GGGGSGGGGSGGGGSGGGGSGGGGS (SEQ ID NO: 187) and any linkers used in the working examples hereinafter.

[0148] In some embodiments of the compositions of this invention, which comprise a peptide linker moiety, acidic residues, for example, glutamate or aspartate residues, are placed in the amino acid sequence of the linker moiety.

[0149] In some embodiments of the compositions of this invention, which comprise a peptide or peptidyl linker moiety, acidic residues, for example, glutamate or aspartate residues, are placed in the amino acid sequence of the linker moiety. Examples include the following peptide linker sequences: GGEGGG (SEQ ID NO: 162); GGEEEGGG (SEQ ID NO: 163); GEEEG (SEQ ID NO: 164); GEEE (SEQ ID NO: 165); GGDGGG (SEQ ID NO: 166): GGDDDGG (SEQ ID NO: 167): GDDD (SEQ ID NO: 168); GDDD (SEQ ID NO: 169); GGGGSDDSDEGSDGEDGGGGS (SEQ ID NO: 170): WEWEW (SEQ ID NO: 171); FEFEF (SEQ ID NO: 172); EEEWWW (SEQ ID NO: 173); EEEFFF (SEQ ID NO: 174); WWEEEWW (SEQ ID NO: 175); or FFEEEFF (SEQ ID NO: 176).

[0150] In other embodiments, the linker constitutes a phosphorylation site, e.g., X1X2YX4X5G, wherein X1, X2, X4, and X5 are each independently any amino acid residue; X1X2SX4X5G, wherein X1, X2, X4 and X5 are each independently any amino acid residue; or X₁X₂TX₄X₅G, wherein X1, X2, X4 and X5 are each independently any amino acid residue.

[0151] The linkers shown here are exemplary; peptidyl linkers within the scope of this invention may be much longer and may include other residues. A peptidyl linker can contain, e.g., a cysteine, another thiol, or nucleophile for conjugation with a half-life extending moiety. In other embodiments, the linker contains a cysteine or homocysteine residue, or other 2-amino-ethanethiol or 3-amino-propanethiol moiety for conjugation to maleimide, iodoacetamide or thioester, functionalized half-life extending moiety.

[0152] Another useful peptidyl linker is a large, flexible linker comprising a random Gly/Ser/Thr sequence, for example: GSGSATGGSGSTASSGSGSATH (SEQ ID NO: 177) or HGSGSATGGSGSTASSGSGSAT (SEQ ID NO: 178), that is estimated to be about the size of a 1 kDa PEG molecule. Alternatively, a useful peptidyl linker may be comprised of amino acid sequences known in the art to form rigid helical structures (e.g., Rigid linker -AEAAAKEAAAKEAAAKAGG-(SEQ ID NO: 179)). Additionally, a peptidyl linker can also comprise a non-peptidyl segment such as a 6-carbon aliphatic molecule of the formula -CH2-CH2-CH2-CH2-CH2-CH2-. The peptidyl linkers can be altered to form derivatives as described herein.

[0153] Optionally, a non-peptidyl linker moiety Is also useful for conjugating the tetraspanin, or functional fragment thereof, to the anti-TLR antibody, or functional fragment thereof. For example, alkyl linkers such as —NH—(CH2)S—C(O)— wherein s=2-20 can be used. These alkyl linkers may further be substituted by any non-sterically hindering group such as lower alkyl (e.g., C1-C6)lower acyl, halogen (e.g., Cl, Br), CN, NH2, phenyl, etc. Exemplary non-peptidyl linkers are polyethylene glycol (PEG) linkers having a molecular weight of about 100 to about 5000 Daltons (Da), preferably about 100 to about 500 Da.

[0154] In some embodiments, the non-peptidyl linker is aryl. The linkers may be altered to form derivatives in the same manner as described in the art, e.g., in Sullivan et al, Toxin Peptide Therapeudc Agents, US2007/0071764; Sullivan et al, Toxin Peptide Therapeutic Agents, PCT/US2007/022831, published as WO2008/088422, which are all incorporated herein by reference in their entireties. “Aryl” is phenyl or phenyl vicinally-fused with a saturated, partially-saturated, or unsaturated 3-, 4-, or 5-membered carbon bridge, the phenyl or bridge being substituted by 0, 1, 2 or 3 substituents selected from C₁₋₈ alkyl, C1-4 haloalkyl or halo. “Heteroaryl” is an unsaturated 5, 6 or 7 membered monocyclic or partially-saturated or unsaturated 6-, 7-, 8-, 9-, 10- or 11 membered bicyclic ring, wherein at least one ring is unsaturated, the monocyclic and the bicyclic rings containing 1, 2, 3 or 4 atoms selected from N, O and S, wherein the ring is substituted by 0, 1, 2 or 3 substituents selected from C₁₋₆ alkyl, C₁₋₄ haloalkyl and halo.

[0155] Non-peptide portions of the inventive composition of matter, such as non-peptidyl linkers or non-peptide half-life extending moieties can be synthesized by conventional organic chemistry reactions.

[0156] The above is merely illustrative and not an exhaustive treatment of the kinds of linkers that can optionally be employed in accordance with the present invention.

[0157] Referring now to FIGS. 1A-7, the present invention features an engineered extracellular vesicle, preferably an exosome, comprising a fusion protein having tetraspanin, or functional fragment thereof, linked to anti-TLR antibody, or functional fragment thereof, that inhibits cell surface expressed TLRs as well are endosomal TLRs.

[0158] In some embodiments, the present invention may feature an engineered extracellular vesicle comprising a fusion protein having tetraspanin, or a functional fragment thereof, linked to an anti-TLR antibody, or a functional fragment thereof, that inhibits cell surface expressed TLRs as well as an endosomal TLRs.

[0159] In some embodiments, the present invention features an engineered exosome that display on the exosome surface or inside the exosome a fusion protein comprising a tetraspanin, such as CD63, fused to an anti-TLR antibody that target and inhibits cell surface expressed TLRs and may inhibit endosomal TLRs (e.g., TLR3, TLR7, TLR8, TLR9, TLR2, TLR4, TLR5, and TLR6-mediated cytokine storms. In some embodiments, the anti-TLR antibody inhibits activation of TLRs binding to their respective ligands. In other embodiments, the anti-TLR antibody inhibits activation of dimerization of endosomal TLRs, which is required for activation. In other embodiments, anti-TLR antibody inhibits endosomal TLR activation via competitive or non-competitive inhibition.

[0160] In some embodiments, the extracellular vesicle is an exosome. Other extracellular vesicles may include, but are not limited to, microvesicles (150 nm-1(m) and apoptotic bodies (>1(m). In some embodiments, apoptotic bodies drive a proinflammatory responses.

[0161] In particular embodiments, the antibody payload is linked or fused to the tetraspanin via one or more protease/endopeptidase recognition sequences cleavable by protease/endopeptidase, such as cathepsins B, H, K, L, and S, as well as aspargine endopeptidase, furin-like proteases, and the like, which are enzymatically active when the exosomes reach the acidic endosomal environment.

[0162] In some embodiments, the engineered extracellular vesicle comprises a tetraspanin selected from the group consisting of TSPAN1, TSPAN2, TSPAN3, TSPAN4, TSPAN5, TSPAN6, TSPAN7, TSPAN8, TSPAN9, TSPAN10, TSPAN11, TSPAN12, TSPAN13, TSPAN14, TSPAN15, TSPAN16, TSPAN17, TSPAN18, TSPAN19, TSPAN20 (uroplakin 1B), TSPAN21 (uropakin1A) TSPAN22 (periphern2), TSPAN23 (retinal outer segment membrane protein1), TSPAN24 (CD151), TSPAN25 (CD53), TSPAN26 (CD37), TSPAN27 (CD82), TSPAN28 (CD81), TSPAN29 (CD9), TSPAN30 (CD63), TSPAN31, TSPAN32, TSPAN33, TSPAN34; and the anti-TLR antibody, or functional fragment thereof, specifically binds a toll-like receptor selected from the group consisting of cell surface expressed TLRs (TLR2, TLR4, TLR5, TLR6) or endosomal TLRs (TLR3, TLR7, TLR8, TLR9). In some embodiments, the tetraspanin is TSPAN30 (CD63).

[0163] In some embodiments, the anti-TLR antibody, or functional fragment thereof, inhibits the binding of an endosomal TLR to a ligand of the TLR. In some embodiments, the anti-TLR antibody, or functional fragment thereof, inhibits dimerization of an endosomal TLR. In some embodiments, the anti-TLR antibody, or functional fragment thereof, inhibits endosomal TLR activation via competitive or non-competitive Inhibition.

[0164] In some embodiments, the fusion protein comprises a peptidyl linker comprising a cleavage site of protease/endopeptidase. In some embodiments, the cleavage site is recognized by a protease/endopeptidase selected from the group consisting of cathepsin B, cathepsin H, cathepsin K, cathepsin L, cathepsin S, asparagine endopeptidase, and furin-like protease. In some embodiments, the peptidyl linker comprises a Z-Loop.

[0165] Some embodiments disclosed herein provide a pharmaceutical composition comprising the engineered extracellular vesicle described in the immediately preceding paragraph, and a pharmaceutically acceptable carrier or excipient. Some embodiments disclosed herein provide a method of treating an inflammatory response in an individual in need thereof, the method comprising administering to the individual therapeutically effective amount of a pharmaceutical composition an engineered extracellular vesicle described in the immediately preceding paragraph, and optionally an acceptable carrier or excipient.

[0166] Also provided herein are methods of treating, ameliorating, reducing, inhibiting an inflammatory response in an Individual in need thereof (such as because of viral Infection, and the like), the method comprising administering to the individual a therapeutically effective amount of a pharmaceutical composition comprising an engineered exosome described herein.

[0167] In some embodiments, the inflammatory response is a symptom of viral infection, bacterial Infection, autoimmune disease or chronic immune activation. In some embodiments, the composition is suitable for the treatment of an inflammatory response as a symptom of one or more disease or malady selected from the group of: COVID-19, cytokine storm, Systemic Lupus Erythematous (SLE), psoriasis, eczema, seborrheic dermatitis, actinic keratosis, glomerulonephritis, Sjögren's syndrome, systemic inflammatory syndrome (SIRS, e.g. sepsis with and without documented pathogen), macrophage activation syndrome (MAS), severe acute respiratory syndrome (SARS), hantavirus pulmonary syndrome, disseminated vascular coagulopathy (DIC), glomerulonephritis, diabetes (Type 1 and 2), traumatic brain injury, transplant, graft vs. host disease, liver fibrosis, pulmonary fibrosis, chronic obstructive pulmonary disease, asthma, influenza, human immunodeficiency virus (HIV) infection, hepatitis infection, viral pneumonia, rheumatoid arthritis, acute lung injury, crush injury, traumatic injury, bone fracture, metabolic syndrome, atherosclerosis, Addison's Disease, pheochromocytoma, metastasis, hyperacute insect sting, anaphylaxis, necrosis associated with flesh-eating bacterial Infection, kidney fibrosis, lupus nephritis, radiation therapy, frostbite, ischemia, reperfusion, myocardial infarction, bacterial pneumonia, bacterial sepsis, Legionnaire's disease and myocarditis and the like. In some embodiments, the inflammatory response is mediated by endosomal TLRs or cell surface expressed TLRs.

[0168] In some embodiments, the inflammatory response is mediated by activation of TLRs. In other embodiments, the methods described herein are useful for treating, ameliorating, reducing, inhibiting a proinflammatory response, which is MyD88-dependent (TLR2, TLR4, TLR5, TLR6, TLR7, TLR8, TLR9) and TRIF-dependent (TLR3). It is also contemplated herein that the described methods of treatment are useful when the activation of endosomal TLRs leads to increased activity of MAP kinases (ERK1/2, JNK, p38), IRAK, TRAF6, nuclear translocation of NF B. and increased activities of proinflammatory cytokines.

[0169] The described methods are also useful for the reduction of proinflammatory cytokines (TNF<, IL-1, IL-6, IL-12) and/or rise in anti-inflammatory cytokines (IL-10, IL-4, TGF-@. In addition, the methods described herein are also contemplated to reduce the level of interferons, such as type 1 and type 3, and the like.

[0170] Some embodiments described herein provide a method of treating, preventing or delaying the onset of cytokine storm in an Individual suspected or at risk of developing SIRS, MAS, or DIC, the method comprising administering to the individual, preferably prophylactically, an effective amount of an engineered exosome or a pharmaceutical composition described herein. In certain embodiments, severe infection-elicited cytokine storm is inhibited, thereby avoiding sepsis.

[0171] Some embodiments described herein provide a method of treating, preventing or delaying the onset of cytokine storm in an individual suspected or at risk of developing septic shock, the method comprising administering to the individual a prophylactically effective amount of an exosome or a pharmaceutical composition as described herein.

[0172] Additionally, the present invention may feature a method of preventing the production of anti-drug antibodies, in an Individual treated with biologics or a method of preventing immunosuppression in an individual treated with anti-TNFα biologic.

[0173] Some embodiments described herein provide an exosome-based delivery system for delivering a therapeutic molecule to a cell, wherein said delivery system comprises a fusion protein comprising a therapeutic molecule comprising an ant-TLR antibody, or functional fragment thereof, fused with a tetraspanin, or functional fragment thereof, wherein said tetraspanin, or functional fragment thereof, is positioned at a surface of an exosome, and wherein said tetraspanin, or functional fragment thereof, is capable of binding to a target on a recipient cell, thereby delivering the therapeutic molecule to the cell.

[0174] Also provided herein, is an exosome-based delivery system for delivering a therapeutic molecule (such as an anti-TLR antibody, and the like) fused with a tetraspanin (e.g., CD63, and the like) at the surface of exosome for binding to a target on recipient cell. In some embodiments, the targeting ligand is a fusion protein, wherein the fusion protein comprises a tetraspanin family protein and a moiety expressed in one of the extracellular loops (e.g. EC2 domain, NH2 domain) of the tetraspanin family protein.

[0175] In some embodiments, the tetraspanin member of the tetraspanin family of proteins is selected from the group consisting of: TSPAN1, TSPAN2, TSPAN3, TSPAN4, TSPAN5, TSPAN6, TSPAN7, TSPAN8, TSPAN9, TSPAN10, TSPAN11, TSPAN12, TSPAN13, TSPAN14, TSPAN15, TSPAN16, TSPAN17, TSPAN18, TSPAN19, TSPAN20 (uroplakin 1B), TSPAN21 (uroplakin1A) TSPAN22 (peripherin2), TSPAN23 (retinal outer segment membrane protein1), TSPAN24 (CD151), TSPAN25 (CD53), TSPAN26 (CD37), TSPAN27 (CD82), TSPAN28 (CD81), TSPAN29 (CD9), TSPAN30 (CD63), TSPAN31, TSPAN32, TSPAN33, and TSPAN34.

[0176] Some embodiments described herein provide a fusion protein comprising a tetraspanin, or a functional fragment thereof, linked to an anti-TLR antibody, or a functional fragment thereof, that inhibits cell surface expressed TLRs or endosomal TLR.

[0177] In some embodiments, the tetraspanin is selected from the group consisting of TSPAN1, TSPAN2, TSPAN3, TSPAN4, TSPAN5, TSPAN6, TSPAN7, TSPAN8, TSPAN9, TSPAN10, TSPAN11, TSPAN12, TSPAN13, TSPAN14, TSPAN15, TSPAN16, TSPAN17, TSPAN18, TSPAN19, TSPAN20 (uroplakin 1B), TSPAN21 (uroplakin1A) TSPAN22 (peripherin2), TSPAN23 (retinal outer segment membrane protein1), TSPAN24 (CD151), TSPAN25 (CD53), TSPAN26 (CD37), TSPAN27 (CD82), TSPAN28 (CD81), TSPAN29 (CD9), TSPAN30 (CD63), TSPAN31, TSPAN32, TSPAN33, TSPAN34; and the anti-TLR antibody, or functional fragment thereof, specifically binds a toll-like receptor, or functional fragment thereof, wherein the toll-like receptor is selected from the group consisting of TLR2, TLR3, TLR4, TLR5, TLR6, TLR7, TLR8, and TLR9. In some embodiments, the tetraspanin, or functional fragment thereof is TSPAN30 (CD63), or a functional fragment thereof.

[0178] In some embodiments, the anti-TLR antibody, or functional fragment thereof, inhibits the binding of an endosomal or cell surface expressed TLR to a ligand of the TLR. In some embodiments, the anti-TLR antibody, or functional fragment thereof, inhibits dimerization of an endosomal TLR.

[0179] In some embodiments, the fusion protein further comprises a peptidyl linker comprising a cleavage site of protease/endopeptidase. In some embodiments, the cleavage site is recognized by a protease/endopeptidase selected from the group consisting of cathepsin B, cathepsin H, cathepsin K, cathepsin L, cathepsin S, asparagine endopeptidase, and furin-like protease. In some embodiments, the peptidyl linker comprises a Z-loop. In some embodiments, the fusion protein is selected from the group of fusion proteins set forth in Table 3 that have an anti-TLR antibody, or a functional fragment thereof, therein.

[0180] Some embodiments described herein provide a method for delivering a therapeutic molecule to an individual in need thereof. In some embodiments, the method comprises harvesting exosomes from a cultured packaging cell line, wherein the packaging cell line comprises the expression vector encoding a fusion protein as described herein. In some embodiments, the method further comprises administering the engineered exosome harvested previously to an individual in need thereof.

[0181] Some embodiments described herein provide a fusion protein comprising a tetraspanin, or a functional fragment thereof, linked to a functional moiety, wherein said fusion protein is selected from the group of fusion proteins set forth in Table 3.

[0182] Some embodiments described herein provide a dominant-negative engineered extracellular vesicle, wherein said extracellular vesicle comprises: a tetraspanin, or functional fragment thereof; a cleavable linker; and a dominant-negative fragment of a TLR receptor.

[0183] In some embodiments, the tetraspanin, or functional fragment thereof, is selected from the group consisting of: TSPAN1, TSPAN2, TSPAN3, TSPAN4, TSPAN5, TSPAN6, TSPAN7, TSPAN8, TSPAN9, TSPAN10, TSPAN11, TSPAN12, TSPAN13, TSPAN14, TSPAN15, TSPAN16, TSPAN17, TSPAN18, TSPAN19, TSPAN20 (uroplakin 1B), TSPAN21 (uropakin1A) TSPAN22 (peripherin2), TSPAN23 (retinal outer segment membrane protein1), TSPAN24 (CD151), TSPAN25 (CD53), TSPAN26 (CD37), TSPAN27 (CD82), TSPAN28 (CD81), TSPAN29 (CD9), TSPAN30 (CD63), TSPAN31, TSPAN32, TSPAN33, and TSPAN34, or a functional fragment of any one of the foregoing. In some embodiments, the dominant-negative fragment of a TLR receptor is a dominant-negative fragment of a toll-like receptor selected from the group consisting of TLR2, TLR3, TLR4, TLR5, TLR6, TLR7, TLR8, and TLR9.

[0184] Provided herein are engineered exosomes with an anti-TLR3, TLR7, TLR8 or TLR9 payload delivered into the endosome via tetraspanin-mediated endocytosis. This antibody: 1) inhibits the binding of endosomal TLRs to their respective ligands; 2) inhibits the dimerization of endosomal TLRs after ligand recognition; and/or 3) competitively or non-competitively inhibits TLR-ligand interaction.

[0185] In certain embodiments, the antibody is fused to CD9, CD63, CD81, CD153 with a linker that is susceptible to cleavage to proteases/endopeptidases activated in an acidic environment in endosome. Such proteases/endopeptidases include but are not limited to: cathepsins B, H, K. L, or S; or endopeptidases, e.g. asparagine endopeptidase

### Example

[0186] The following is a non-limiting example of the present invention, it is to be understood that said example is not Intended to limit the present invention in any way. Equivalents or substitutes are within the scope of the present invention.

### Example 1

[0187] Genetically modify human cells to produce engineered exosomes that deliver antibodies into endosomes inhibiting endosomal TLR-mediated inflammation.

### Example 1.1 Exosome-Based Payload Encapsulation and Delivery

[0188] Tetraspanins are scaffold proteins expressed abundantly on the exosome surface. They are relatively small (220-350aa) and are used herein for exosomes display via molecular engineering in mammalian cells. In accordance with the present invention, an Innovative system is provided herein that delivers biologics that have been encapsulated inside engineered exosomes. Fusion protein constructs comprising fluorescent reporters or anti-endosomal-TLRs antibodies fused to the inner surface region of a tetraspanin, such as CD63, are constructed (FIGS. 2A-2B). The system according to the invention delivers large molecule therapeutics to intracellular targets that were previously undruggable by antibody biopharmaceuticals.

[0189] TLR3, 7, 8, and 9 reside in the endosomal membrane and, mediated by the ER membrane protein Unc93B1, the TLRs are transported from the endoplasmic reticulum to endolysosomes. In accordance with the present Invention, the engineered exosomes are effectively delivered to the endosomes. CD63 is a preferred targeting molecule because it is the most abundant surface marker of exosomes. Importantly, CD63 contains an intrinsic membrane localization signal, and traffics exosomes to the endocytic compartments. Using fluorescent reporters, the incorporation of the CD63 scaffold correctly onto exosomes and their delivery into endocytic compartments is monitored.

[0190] Next, TLRs 3, 7, 8and 9 possess along, inserted loop region (Z-loop) consisting of 45-60 amino acid residues (14 aa for TLR3; Table 1). Importantly, proteolytic cleavage at the Z-oop is believed to be indispensable for the function of TLRs, and cleavage site(s) lie within disordered regions of Z-loops in crystal structures. The methods and constructs described herein advantageously employ Z-loop as the cleavage site to release the payload (e.g., an scFv anti-TLR) after reaching the endosomal compartments. To that end, Z-loops are used in constructs as a cleavable linker between CD63 and payload (anti-TLR scFv) to exploit cleavage by endosomal proteases such as cathepsins, asparagine endopeptidases (AEP), furin-like proteases, and the like. The antibody-based payload is then untethered from the membrane, which facilitates anti-TLR payload binding to TLR receptor thus blocking inflammation induced by TLR-mediated signaling in the endosomes.

TABLE 1
Protease recognition site (bold) and known cleavage sites (arrows)
in Z-loops of TLRs.

| | | | Disordered | SEQ |
|---|---|---|---|---|
| TLR | Z-loop Sequence | Proteases | in Z-loop | ID NO: |
| TLR7 | NKISPSGDSSEVGFCSNARTSVESYEP | Cathepsins | PDB: 5GMF | 180 |
| | QVLEQLHYFRYDKYARSCRFKNKEAS | PMID: 21402738 | PMID: 27742543 | |
| | FMSVNES | | | |
| TLR8 | NRISPLVKDTRQSYAQSSSFQRHIRKR | PMID: 26929371 | PDB: 4R07 | 181 |
| | R↓STDFEFDPHSNFYHFTRPLIKPQ | | PMID: 25599397 | |
| TLR9 | NRISGASELTATMGEADGGEKVWLQP | Cathepsins, AEP | PDB: 3WPC | 182 |
| | GDLAPAPVDTPSSEDFRPN | (PMID: 21402738, | PMID: 25686612 | |
| | | 19879164) | | |
| Horse | NRISGAVEPVATTGEVDGGKKVWLTS | | | 183 |
| | RDLTPGPLDTPSSEDFMPSCKNLSF | | | |
| TLR3 | SFTKQSISLA↓SLPK | PMID: 25305318 | PD: 1ZIW | 184 |
| | | | PMID: 15961631 | |

### Example 1.2 Screening of Endosomal Anti-TLR Antibodies for Inhibition of Signaling by Intracellular Receptors

[0191] Protein complexes comprising (1) endosomally-trafficked transferrin, (2)streptavidin, (3) biotin-Protein A and (4) a series of anti-TLR antibodies, or TLR-binding fragments thereof (payload) are formed in vitro (FIG. 3). Screening assays using anti-TLR antibodies in protein complexes are used to measure inhibition of pro-inflammatory signaling by TLRs. In the signaling assay, reporter cell lines (including HEK TLR9 NFkB SEAP, HEK TLR8 NFkB SEAP, HEK TLR3 NFkB SEAP and control HEK NFkB SEAP) are pre-treated with protein complexes to promote uptake and trafficking into the endosome where the anti-TLR antibody payload is released to bind endosomal target (TLR receptor). Stimulation with the requisite TLR ligand results in phosphorylation of l1cB dissociating l1cB from NF1cB/l1cB complex resulting in NFkB translocating to the nucleus to induce expression of alkaline phosphatase (SEAP), which is secreted into the culture medium. Samples of culture medium are tested for SEAP enzymatic activity in alkaline buffer containing the fluorogenic substrate 4-methylumbelliferyl phosphate (FIG. 3). The first round of analysis utilizes protein complexes armed with polyclonal antibodies (against TLR9, TLR8, TLR7 or TLR3) to validate the approach for antagonizing each of these pathways.

### Example 1.2.1 Protein Complexes Bearing Anti-TLR9 Polyclonal Antibody Inhibit TLR9 Signaling in Reporter Cells

[0192] FIG. 4A shows that HEK-TLR9 NFkB cells that were treated with CpG DNA oligo (ODN 2006) in LyoVec, substantially as described above in Example 1.2, secreted SEAP into the medium (as shown by the initial rate of 4-MUP hydrolysis by AP enzyme), whereas HEK-NFkB control cells did not. FIG. 4B shows that HEK-TLR9 NFkB cells treated with CpG (10 μg/mL in LyoVec) secreted SEAP into the medium, but pre-treatment with protein complexes (containing endosome-trafficked transferrin) that bear the anti-TLR9 polyclonal antibody payload inhibited SEAP secretion in a concentration-dependent manner. Protein complexes bearing non-specific IgG had no effect. FIG. 4C, shows that neither the TLR7 agonist imiquimod nor LyoVec could stimulated TLR9 signaling in HEK-TLR9 NFkB cells. Pre-treatment with free antibody (either non-specific IgG or anti-TLR9 antibody) did not inhibit CpG/LyoVec-stimulated TLR9 signaling. Pre-treatment with the protein complex armed with control IgG did not inhibit TLR9 signaling with CpG/LyoVec, but by comparison, protein complexes loaded with anti-TLR9 polyclonal antibody payload demonstrated inhibition of signaling in a concentration dependent manner with 9 nM and 18 nM anti-TLR9 complex (*, p<0.05; * p<0.01).

### Example 1.2.2 Second Round Screening of anti-TLR Monoclonal Antibody Complexes

[0193] For TLR receptors that are inhibited, such as demonstrated for TLR9 above in Example 1.2.1, a second round is used to screen complexes armed with a series of monoclonal antibodies against the TLR (Table 2) and custom antibodies obtained from AvantGen (San Diego, Calif.). Hits identified from screening in cell assays (monoclonal antibodies that inhibit signaling) are tested for in vitro binding (pH 7 initially, later at endosomal pH 5.5) to TLRs using cell lysates (as TLR source) in ELISA kits [Human TLR3 ELISA Kit (Biogems cat. no. BGK6YOF1), Human TLR8 ELISA Kit (Aviva Systems Biology cat. no. OKEH01387), Human TLR8 ELISA Kit (MyBioSource cat no. MBS744532; LifeSpan Biosciences cat no. LS-F5812; Gentaur cat. no. 201-12-0376) or Human TLR9 ELISA Kit (MyBioSource cat. no. MBS751526; Antibodies Online cat. no. ABIN414673; Elabscience cat. no. E-EL-H0952) in which the secondary antibody-HRP conjugate is replaced with HRP (conjugated to Protein A. Protein G, anti-IgG as appropriate). High affinity binders at acidic pH are the Hit antibodies.

TABLE 2

| TLRs | Clone | Vendor |
|---|---|---|
| TLR3 | TLR3.7 | Thermo-Fisher |
| | 40C1285.6 | Invitrogen |
| TLR7 | A94B10 | BD Biosciences |
| | 4G6 | Invitrogen |
| TLR8 | 44C143 | Invitrogen |
| | 44B05 | Thermo-Fisher |
| TLR9 | 26C593.2 | Abcam |

[0194] Next, hits (anti-TLR antibody clones) are selected for fusion of the anti-TLR payload in the form of single chain variable fragment (scFv). DNA from positive clones in the AvantGen library is sequenced or protein sequence is obtained by proteolysis/Mass Spectrometry analysis using nSMOL Antibody BA Kit with MS analysis (both by Shimadzu) or by REmAb Antibody Sequencing service (Rapid Novor Kitchener, Ontario, CA). Lead antibodies are engineered as the payload (in the form of single-chain Fv (scFv)) as fusion proteins with tetraspanins (e.g., with an intervening cathepsin cleavage site) to generate prototype engineered exosomes for the drug delivery system described herein. Cleavage is optimized by testing a series of unlabeled peptides (containing cathepsin cleavage sites) in the presence of purified human cathepsin H and B (endosome-resident) in the presence of fluorogenic competitor substrate (Z-Arg-Arg-AMC, Sigma or similar (PMID 12201820)) to measure kinetic parameters (Km and kcat) of the unlabeled peptides [Case, 2003 #1453). Peptides with high selectivity (kcat/Km) for cathepsins H and/or B are engineered as the cathepsin site between tetraspanin and scFv payload. This novel payload encapsulation system provides an advantageous platform for supporting drug delivery and exosome-based therapy for delivery to intracellular targets that previously could not be targeted by biopharmaceuticals.

### Example 1.3 Stable Transfection and Production of Engineered Exosomes

[0195] The biological effects mediated by exosomal uptake in recipient cells depend on the donor cells. Exosomes produced by mature DCs carry major histocompatibility complex class ii (MHCII), intercellular adhesion molecule-1(ICAM-1) and co-stimulatory molecules and are potent T-cell stimulators. Mesenchymal stem cells (MSC) were clinically tested in humans and were immunosuppressive. MSCs are also the most prolific exosome producers; and are well suited for mass production of exosomes that are ideal for drug delivery in cases of inflammatory-driven autoimmune diseases.

[0196] MSC (ATCC cat. no. PCS-500-012) is stably transfected with a recombinant construct (FIGS. 2A-2B) to generate a stable cell line to produce exosomes. Engineered exosomes are generated from these stably transfected cells for further characterization. In other embodiments, a lab-scale hollow fiber bioreactor with protein-free culture medium can be used to obtain conditioned cell culture supernatant as a source of exosomes. Hollow fiber culture systems can sustain large numbers (>10′) of cells and produce highly concentrated cell culture supernatants in the manufacturing scale.

[0197] Using the encapsulation technology according to the invention to link a tetraspanin, such as CD63 as a molecular scaffold, to anti-TLR antibodies to encapsulate the payload inside exosomes results in preserving the natural targeting of the desired cells by exosomes. The novel technology provides a means for delivering anti-inflammatory molecules to specifically targeted pro-inflammatory cells rather than eliciting non-selective off-target effects. Since the payload Is encapsulated inside exosomes, it Is hidden from recognition by the immune system thereby avoiding time dependent increases in autoantibody expression, which is a drawback with using current anti-TNF(biologicals. Furthermore, using the Z-loops as the linker-cleavage site, the anti-TLR antibody payload is released from its fusion to CD63 within the exosome allowing the free antibodies to bind the intracellular (endosomal) TLR target and block TLR signaling. The specificity of using engineered exosomes as a drug carrier in accordance with the present invention provides new and improved treatments of many inflammation-driven diseases, such as, e.g., psoriasis, rheumatoid arthritis, systemic lupus erythematous, and the like, without significant side effects on bystander cells or significant other off-target side-effects.

[0198] In other embodiments, the anti-TLR fused to a Fab region is employed. In other embodiments, cells can be treated with engineered exosomes bearing CD63 fusions to the extracellular domains of TLR3, 7, 8 or 9 (lacking the transmembrane and TIR domains) instead of scFv or Fab. After cleavage, the newly liberated soluble receptors undergo ligand-mediated 4 K heterodimerization with intact endosomal TLR and block pro-inflammatory signaling.

### Example 1A Production of Engineered Exosomes Expressing Tetraspanin Fusions to Dominant-Negative TLR Receptors

[0199] Exosomes are engineered with fusions to dominant-negative (DN) TLRs that are defective in signaling (instead of tetraspanin fused to scFv or Fab). Cells are treated with tetraspanin fused to DN TLRs which are trafficked to the endosome, where upon ligand engagement, the DN TLR protomer heterodimerizes with the endogenous TLR to form a defective receptor complex that cannot signal downstream. Cells are treated with engineered exosomes bearing, for example, (in order from N- to -terminus) CD63 (lacking the fourth transmembrane (0204-224) and third cytoplasmic domain (0225-238)) fused to a cleavable linker (Z-domain) fused to domains of TLR3 (lacking signal peptide and TRIF domain) or TLR7, 8, or 9 (lacking the signal peptide and TIR domains). Thus, as set forth in Table 4, the engineered exosomes for DN TLR3 express C063(0204-238)-Zkoop-TLR3(01-23, 0726-904) fusion; the engineered exosomes for DN TLR7 express CD63(0204-238)-Zloop-TLR7(01-26, 0861-1049) fusion; the engineered exosomes for DN TLR8 express CD63(0204-238)-Zloop-TLR8(01-26, 0849-1041) fusion; and the engineered exosomes for DN TLR9 would express CD63(0204-238)-Zloop-TLR9(01-25, 0840-1032) fusion. After proteolytic cleavage in the endosome, the N-terminus of TLR receptors is liberated, and the DN TLR monomer can undergo ligand-mediated heterodimerization with intact endosomal TLR and block signaling.

TABLE 4

| Dominant- | |
|---|---|
| Negative | |
| Toll-Like | |
| Receptor | |
| fusion | Fusion (N-terminus to C-terminus) |
| DN TLR3 | CD63(A204-238)-Zloop-TLR3(A1-23, A726-904) |
| DN TLR7 | CD63(A204-238)-Zloop-TLR7(A1-26, A861-1049) |
| DN TLR8 | CD63(A204-238)-Zloop-TLR8(A1-26, A849-1041) |
| DN TLR9 | CD63(A204-238)-Zloop-TLR9(A1-25, A840-1032) |

### Example 2 Biophysical and Functional Characterization of Engineered Exosomes

[0200] In accordance with the present invention, methods, systems and exosome compositions are provided to prevent inflammation-driven autoimmune diseases, such as, e.g., rheumatoid arthritis, psoriasis, SLE, and the like, caused by activation of endosomal TLRs. Engineered exosomes are delivered to the endocytic compartments with a therapeutic payload that neutralizes endosomal TLR-driven inflammation. Stable cells are engineered to harness the ability of the robust system of the present invention for continuous engineered exosome production, and the mechanism of uptake of the exosomes is evaluated.

### Example 2.1. Determine whether the biophysical characteristics of exosomes are affected by genetic modification

[0201] To determine whether the engineered exosomes mature and ultimately release into extracellular space, engineered exosomes are subjected to nanoparticle tracking analysis. The size distribution (hydrodynamic diameter), and particle concentration is estimated. Exosomes isolated from engineered cells tagged with fluorescent protein in the amino terminus of CD64 and exosomes isolated from unmodified control cells are subjected to nanoparticle tracking analysis for comparison, using NanoSight NS300 (Malvern Instruments, University of Arizona core facility). For transmission electron microscopy (TEM), engineered exosomes and control exosome samples are fixed with 2% glutaraldehyde (Sigma-Aldrich) and then adsorbed to formvar/carbon coated TEM copper grids (SPI, Cat #3420C-MB). Samples are then stained negatively with 1% Uranyl Acetate (Sigma-Aldrich) for 10 sec. The samples are evaluated on JEOL 1011 transmission microscope at 80 kV, and digital images are acquired using AMT camera system (University of Arizona, Core Facility). The next characterization is subjecting the samples to Western blotting and probe with anti-CD63 antibody. CD63 is selected because it is the most abundant surface marker in exosomes. These experiments are used to determine whether genetic modification affects the biophysical characteristics of engineered exosomes.

[0202] Results: Exosomes have reported sizes of 40-120 nm. Using nanoparticle-tracking analysis, the engineered exosomes display two major peaks between 40-120 nm that are consistent with the reported sizes of exosomes. In addition, minor peaks greater than 120 nm exist, suggesting heterogeneity of exosomes. Although the heterogeneous nature of exosomes is not new, heterogeneity is found to exist under certain conditions. There are no differences in exosome sizes between our engineered exosomes compared to exosomes isolated from unmodified cells. Electron microscopy of negatively charged stain engineered exosomes reveals cup-shaped membrane vesicles of 50-90 nm. No differences between our engineered exosomes and exosomes from unmodified cells are revealed by transmission electron microscopy. Western blotting of engineered exosomes probed with anti-CD63 shows a positive band, which is consistent with published reports. These experimental results show that modified exosomes exhibit similar biophysical characteristics as that of unmodified exosomes.

### Example 2.2: The Uptake of Engineered Exosomes is Characterized to Determine Whether they Inhibit Endosomal TLR-Driven Inflammation

[0203] Because many exosome proteins have been shown to interact with membrane receptors on target cells, it is contemplated herein that exosome uptake is dependent upon the signaling status of recipient cells and of the protein complement of the exosome. Internalization of exosomes occurs frequently at recipient cells via direct fusion with the plasma membrane or endocytosis. Exosomes are usually taken up into the endosomal compartments via endocytosis. It is contemplated herein that recipient cells, via endocytosis, take up the engineered exosomes and the normal function or trafficking of the tetraspanin protein is not affected. To test this hypothesis, the fluorescent protein GFP2 linked to tetraspanin CD63 is monitored. Exosome uptake into primary macrophages is monitored by adding engineered exosomes detectable by fluorescent microscopy. Acceptor monocyte-derived macrophages (MDMs) are plated and then combined with different doses of purified GFP2-tagged exosomes and incubated for different times (i.e. 1-2h). Exosomes from unmodified cells are used as control. Next, whether the uptake of engineered exosomes is energy-dependent process is determined.

[0204] Macrophages are added to labeled exosomes and Incubated at 40C and their capacity internalize exosomes is determined. Control cells are incubated at 37 C. Next, whether the uptake of exosomes by macrophages requires a functioning cytoskeleton is determined; macrophages treated with engineered exosomes are pre-treated with cytochalasin D (metabolite that depolymerize actin filament network). These experiments will show whether uptake of engineered exosomes is an energy-dependent process that requires functioning cytoskeleton, both of which are indicative of endocytic pathways.

[0205] Next, whether macrophage uptake of engineered exosomes is dependent on clathrin-mediated endocytosis is determined. Macrophages are pre-treated with or without chlorpromazine (prevents the formation of clathrin coated pits at the plasma membrane). These experiments demonstrate that clathrin-mediated endocytosis plays a role in engineered exosome uptake.

[0206] Whether engineered exosomes can deliver fusion proteins to the endosome and release payload via the cleavable linker is determined. MDM cells are treated with engineered exosomes bearing the EYFP-CD63-Zloop-GFP2 fusion (fusion controls: EYFP-CD63-GFP2, EYFP-CD63 and CD63-GFP2) and are imaged by confocal microscopy or fluorescence microscope or flow cytometry. Cells containing uncleaved fusion exhibit a FRET signal. To the extent that the fusion protein is cleaved as intended in the Z-loop by endosomal protease(s), the FRET signal is decreased, whereas direct excitation of EYFP produces an unchanged yellow emission (indicating intact EYFP), and direct excitation of GFP2 yields increased green emission (indicating after proteolytic cleavage that intact free GFP2 is liberated and diffused away from membrane-bound EYFP). Constructs tested in cleavage assays include Z-oops from TLR3, TLR7, TLR8 or TLR9 as cleavable linkers. Imaging after LysoTracker Blue dye treatment Indicates trafficking to acidic endosomal compartments without interfering with detection of EYFP, GFP2 or FRET emissions.

[0207] Next, whether engineered exosomes modulate the inflammatory responses driven by endosomal TLR activated macrophages is determined, which includes measuring TNF(, IL-1, IL-4, IL-6, IL-10, TGF®, IL-12 levels in cell-free supernatant and comparing macrophages treated with and without different poly(IC)-TLR3 (InvivoGen), ssRNA40-TLR7/8 (InvivoGen), and CpG ODN-TLR9 (Sigma) followed by addition of engineered exosomes. Cytokines are measured using Multiplex Cytokine Assay (Millipore). Unmodified exosomes are used as negative control. These experiments indicate that engineered exosomes inhibit endosomal TLR ligand-mediated cytokine release.

[0208] These experiments demonstrate that when purified GFP2-tagged exosomes are incubated with adherent macrophages, engineered exosomes are taken up and delivered into the endosomal compartments. After incubation of macrophages with engineered exosomes, macrophages become fluorescent with time; and increasing amount of exosome uptake leads to brighter fluorescence, indicating specific uptake. Exosome uptake is confirmed by flow cytometry by a showing that a mean fluorescence index (MFI) is proportional to the amount of GFP2-tagged exosomes added. In contrast, control macrophages without GFP2-displayed exosomes show no GFP2 fluorescent background. Using confocal imaging, macrophages that internalized fluorescent exosomes display punctate intracellular fluorescence pattern, consistent with compartmentalized endosomal endocytosis. Furthermore, exosomal uptake is an energy-dependent process that requires cytoskeletal rearrangement, both indicative of endocytic pathways. These experiments indicate that surface displayed exosomes are functional and can be taken up by macrophages without altering the behavior of the exosomes during uptake.

[0209] It is contemplated herein that endosomal TLR ligands induce a robust inflammatory response indicated by increased levels of inflammatory cytokines such as TNF(, IL-6, IL-12 but not IL-4, IL-10, TGF®. However, in the presence of engineered exosomes according to the present invention, induction of inflammatory cytokines TNF(, IL-6, IL-12 is severely Inhibited but not the anti-inflammatory cytokines IL-4, IL-10. TGF®. These experiments demonstrate that the payload encapsulation system of the present invention provides a novel platform for supporting drug delivery and exosome-based therapy for inhibiting endosomal-driven inflammatory responses, and for treating the diseases caused by the endosomal-driven inflammatory responses

[0210] Table 3, which provides a Listing of Sequences is appended hereto.

[0211] As used herein, the term “about” refers to plus or minus 10% of the referenced number.

[0212] Although there has been shown and described the preferred embodiment of the present invention, it will be readily apparent to those skilled in the art that modifications may be made thereto which do not exceed the scope of the appended claims. Therefore, the scope of the invention is only to be limited by the following claims. In some embodiments, the figures presented in this patent application are drawn to scale, including the angles, ratios of dimensions, etc. In some embodiments, the figures are representative only and the claims are not limited by the dimensions of the figures. In some embodiments, descriptions of the inventions described herein using the phrase “comprising” includes embodiments that could be described as “consisting essentially of” or “consisting of”, and as such the written description requirement for claiming one or more embodiments of the present invention using the phrase “consisting essentially of” or “consisting of” is met.

The application's sequence listing, which the Patent Office published only in electronic form, follows.

SEQUENCE LISTING (187 sequences)

SEQ ID NO: 1 - protein, 534 aa, Artificial Sequence
  CD63-TLR7Zloop-GFP2
MAVEGGMKCVKFLLYVLLLAFCACAVGLIAVGVGAQLVLSQTIIQGATPGSLLPVVIIAVGVFLFLVAFVGCCGACKENYCLMITFAIFLSLIMLVEVAAAIAGYVFRDKVMSEFNNNFRQQMENYPKNNHTASILDRMQADFKCCGAANYTDWEKIPSMSKNRVPDSCCINVTVGCGINFNEKAIHKEGCVEKIGGWLRKNVLVVAAAALGIAFVEVLGIVFACCLVKSIRSGYEVMNKISPSGDSSEVGFCSNARTSVESYEPQVLEQLHYFRYDKYARSCRFKNKEASFMSVNESMSKGEELFTGVVPILVELDDVNGQKFSVSGEGEGDATYGKLTLKFICTTGKLPVPWPTLVTTLSYGVQCFSRYPDHMKQHDFFKSAMPEGYVQERTIFYKDDGNYKTRAEVKFEGDTLVNRIELKGIDFKEDGNILGHKMEYNYNSHNVYIMADKPKNGIKVNFKIRHNIKDGSVQLADHYQQNTPIGDGPVLLPDNHYLSTQSALSKDPNEKRDHMILLEFVTAAGITHMDELYK

SEQ ID NO: 2 - protein, 810 aa, Artificial Sequence
  TLR7signal-EYFP-CD63-TLR7Zloop-GFP2
MVFPMWTLKRQILILFNIILISKLLGMVSKGEELFTGVVPILVELDGDVNGHKFSVSGEGEGDATYGKLTLKFICTTGKLPVPWPTLVTTFGYGLQCFARYPDHMKQHDFFKSAMPEGYVQERTIFFKDDGNYKTRAEVKFEGDTLVNRIELKGIDFKEDGNILGHKLEYNYNSHNVYIMADKQKNGIKVNFKIRHNIEDGSVQLADHYQQNTPIGDGPVLLPDNHYLSYQSALSKDPNEKRDHMVLLEFVTAAGITLGMDELYKSGLRSTGSRMAVEGGMKCVKFLLYVLLLAFCACAVGLIAVGVGAQLVLSQTIIQGATPGSLLPVVIIAVGVFLFLVAFVGCCGACKENYCLMITFAIFLSLIMLVEVAAAIAGYVFRDKVMSEFNNNFRQQMENYPKNNHTASILDRMQADFKCCGAANYTDWEKIPSMSKNRVPDSCCINVTVGCGINFNEKAIHKEGCVEKIGGWLRKNVLVVAAAALGIAFVEVLGIVFACCLVKSIRSGYEVMNKISPSGDSSEVGFCSNARTSVESYEPQVLEQLHYFRYDKYARSCRFKNKEASFMSVNESMSKGEELFTGVVPILVELDGDVNGQKFSVSGEGEGDATYGKLTLKFICTTGKLPVPWPTLVTTLSYGVQCFSRYPDHMKQHDFFKSAMPEGYVQERTIFYKDDGNYKTRAEVKFEGDTLVNRIELKGIDFKEDGNILGHKMEYNYNSHNVYIMADKPKNGIKVNFKIRHNIKDGSVQLADHYQQNTPIGDGPVLLPDNHYLSTQSALSKDPNEKRDHMILLEFVTAAGITHGMDELYK

SEQ ID NO: 3 - protein, 810 aa, Artificial Sequence
  TLR7signal-EYFP-TLR7Zloop-CD63-GFP2
MVFPMWTLKRQILILFNIILISKLLGMVSKGEELFTGVVPILVELDGDVNGHKFSVSGEGEGDATYGKLTLKFICTTGKLPVPWPTLVTTFGYGLQCFARYPDHMKQHDFFKSAMPEGYVQERTIFFKDDGNYKTRAEVKFEGDTLVNRIELKGIDFKEDGNILGHKLEYNYNSHNVYIMADKQKNGIKVNFKIRHNIEDGSVQLADHYQQNTPIGDGPVLLPDNHYLSYQSALSKDPNEKRDHMVLLEFVTAAGITLGMDELYKSGLRSTGSRNKISPSGDSSEVGFCSNARTSVESYEPQVLEQLHYFRYDKYARSCRFKNKEASFMSVNESMAVEGGMKCVKFLLYVLLLAFCACAVGLIAVGVGAQLVLSQTIIQGATPGSLLPVVIIAVGVFLFLVAFVGCCGACKENYCLMITFAIFLSLIMLVEVAAAIAGYVFRDKVMSEFNNNFRQQMENYPKNNHTASILDRMQADFKCCGAANYTDWEKIPSMSKNRVPDSCCINVTVGCGINFNEKAIHKEGCVEKIGGWLRKNVLVVAAAALGIAFVEVLGIVFACCLVKSIRSGYEVMMSKGEELFTGVVPILVELDGDVNGQKFSVSGEGEGDATYGKLTLKFICTTGKLPVPWPTLVTTLSYGVQCFSRYPDHMKQHDFFKSAMPEGYVQERTIFYKDDGNYKTRAEVKFEGDTLVNRIELKGIDFKEDGNILGHKMEYNYNSHNVYIMADKPKNGIKVNFKIRHNIKDGSVQLADHYQQNTPIGDGPVLLPDNHYLSTQSALSKDPNEKRDHMILLEFVTAAGITHGMDELYK

SEQ ID NO: 4 - protein, 527 aa, Artificial Sequence
  CD63-TLR8Zloop-GFP2
MAVEGGMKCVKFLLYVLLLAFCACAVGLIAVGVGAQLVLSQTIIQGATPGSLLPVVIIAVGVFLFLVAFVGCCGACKENYCLMITFAIFLSLIMLVEVAAAIAGYVFRDKVMSEFNNNFRQQMENYPKNNHTASILDRMQADFKCCGAANYTDWEKIPSMSKNRVPDSCCINVTVGCGINFNEKAIHKEGCVEKIGGWLRKNVLVVAAAALGIAFVEVLGIVFACCLVKSIRSGYEVMNRISPLVKDTRQSYANSSSFQRHIRKRRSTDFEFDPHSNFYHFTRPLIKPQMSKGEELFTGVVPILVELDGDVNGQKFSVSGEGEGDATYGKLTLKFICTTGKLPVPWPTLVTTLSYGVQCFSRYPDHMKQHDFFKSAMPEGYVQERTIFYKDDGNYKTRAEVKFEGDTLVNRIELKGIDFKEDGNILGHKMEYNYNSHNVYIMADKPKNGIKVNFKIRHNIKDGSVQLADHYQQNTPIGDGPVLLPDNHYLSTQSALSKDPNEKRDHMILLEFVTAAGITHGMDELYK

SEQ ID NO: 5 - protein, 801 aa, Artificial Sequence
  TLR8signal-EYFP-CD63-TLR8Zloop-GFP2
MENMFLQSSMLTCIFLLISGSCELCAMVSKGEELFTGVVPILVELDGDVNGHKFSVSGEGEGDATYGKLTLKFICTTGKLPVPWPTLVTTFGYGLQCFARYPDHMKQHDFFKSAMPEGYVQERTIFFKDDGNYKTRAEVKFEGDTLVNRIELKGIDFKEDGNILGHKLEYNYNSHNVYIMADKQKNGIKVNFKIRHNIEDGSVQLADHYQQNTPIGDGPVLLPDNHYLSYQSALSKDPNEKRDHMVLLEFVTAAGITLGMDELYKSGLRSTGSRMAVEGGMKCVKFLLYVLLLAFCACAVGLIAVGVGAQLVLSQTIIQGATPGSLLPVVIIAVGVFLFLVAFVGCCGACKENYCLMITFAIFLSLIMLVEVAAAIAGYVFRDKVMSEFNNNFRQQMENYPKNNHTASILDRMQADFKCCGAANYTDWEKIPSMSKNRVPDSCCINVTVGCGINFNEKAIHKEGCVEKIGGWLRKNVLVVAAAALGIAFVEVLGIVFACCLVKSIRSGYEVMNRISPLVKDTRQSYANSSSFQRHIRKRRSTDFEFDPHSNFYHFTRPLIKPQMSKGEELFTGVVPILVELDGDVNGQKFSVSGEGEGDATYGKLTLKFICTTGKLPVPWPTLVTTLSYGVQCFSRYPDHMKQHDFFKSAMPEGYVQERTIFYKDDGNYKTRAEVKFEGDTLVNRIELKGIDFKEDGNILGHKMEYNYNSHNVYIMADKPKNGIKVNFKIRHNIKDGSVQLADHYQQNTPIGDGPVLLPDNHYLSTQSALSKDPNEKRDHMILLEFVTAAGITHGMDELYK

SEQ ID NO: 6 - protein, 801 aa, Artificial Sequence
  TLR8signal-EYFP-TLR8Zloop-CD63-GFP2
MENMFLQSSMLTCIFLLISGSCELCAMVSKGEELFTGVVPILVELDGDVNGHKFSVSGEGEGDATYGKLTLKFICTTGKLPVPWPTLVTTFGYGLQCFARYPDHMKQHDFFKSAMPEGYVQERTIFFKDDGNYKTRAEVKFEGDTLVNRIELKGIDFKEDGNILGHKLEYNYNSHNVYIMADKQKNGIKVNFKIRHNIEDGSVQLADHYQQNTPIGDGPVLLPDNHYLSYQSALSKDPNEKRDHMVLLEFVTAAGITLGMDELYKSGLRSTGSRNRISPLVKDTRQSYANSSSFQRHIRKRRSTDFEFDPHSNFYHFTRPLIKPQMAVEGGMKCVKFLLYVLLLAFCACAVGLIAVGVGAQLVLSQTIIQGATPGSLLPVVIIAVGVFLFLVAFVGCCGACKENYCLMITFAIFLSLIMLVEVAAAIAGYVFRDKVMSEFNNNFRQQMENYPKNNHTASILDRMQADFKCCGAANYTDWEKIPSMSKNRVPDSCCINVTVGCGINFNEKAIHKEGCVEKIGGWLRKNVLVVAAAALGIAFVEVLGIVFACCLVKSIRSGYEVMMSKGEELFTGVVPILVELDGDVNGQKFSVSGEGEGDATYGKLTLKFICTTGKLPVPWPTLVTTLSYGVQCFSRYPDHMKQHDFFKSAMPEGYVQERTIFYKDDGNYKTRAEVKFEGDTLVNRIELKGIDFKEDGNILGHKMEYNYNSHNVYIMADKPKNGIKVNFKIRHNIKDGSVQLADHYQQNTPIGDGPVLLPDNHYLSTQSALSKDPNEKRDHMILLEFVTAAGITHGMDELYK

SEQ ID NO: 7 - protein, 521 aa, Artificial Sequence
  CD63-TLR9Zloop-GFP2
MAVEGGMKCVKFLLYVLLLAFCACAVGLIAVGVGAQLVLSQTIIQGATPGSLLPVVIIAVGVFLFLVAFVGCCGACKENYCLMITFAIFLSLIMLVEVAAAIAGYVFRDKVMSEFNNNFRQQMENYPKNNHTASILDRMQADFKCCGAANYTDWEKIPSMSKNRVPDSCCINVTVGCGINFNEKAIHKEGCVEKIGGWLRKNVLVVAAAALGIAFVEVLGIVFACCLVKSIRSGYEVMNRISGASELTATMGEADGGEKVWLQPGDLAPAPVDTPSSEDFRPNMSKGEELFTGVVPILVELDGDVNGQKFSVSGEGEGDATYGKLTLKFICTTGKLPVPWPTLVTTLSYGVQCFSRYPDHMKQHDFFKSAMPEGYVQERTIFYKDDGNYKTRAEVKFEGDTLVNRIELKGIDFKEDGNILGHKMEYNYNSHNVYIMADKPKNGIKVNFKIRHNIKDGSVQLADHYQQNTPIGDGPVLLPDNHYLSTQSALSKDPNEKRDHMILLEFVTAAGITHGMDELYK

SEQ ID NO: 8 - protein, 794 aa, Artificial Sequence
  TLR9signal-EYFP-CD63-TLR9Zloop-GFP2
MGFCRSALHPLSLLVQAIMLAMTLAMVSKGEELFTGVVPILVELDGDVNGHKFSVSGEGEGDATYGKLTLKFICTTGKLPVPWPTLVTTFGYGLQCFARYPDHMKQHDFFKSAMPEGYVQERTIFFKDDGNYKTRAEVKFEGDTLVNRIELKGIDFKEDGNILGHKLEYNYNSHNVYIMADKQKNGIKVNFKIRHNIEDGSVQLADHYQQNTPIGDGPVLLPDNHYLSYQSALSKDPNEKRDHMVLLEFVTAAGITLGMDELYKSGLRSTGSRMAVEGGMKCVKFLLYVLLLAFCACAVGLIAVGVGAQLVLSQTIIQGATPGSLLPVVIIAVGVFLFLVAFVGCCGACKENYCLMITFAIFLSLIMLVEVAAAIAGYVFRDKVMSEFNNNFRQQMENYPKNNHTASILDRMQADFKCCGAANYTDWEKIPSMSKNRVPDSCCINVTVGCGINFNEKAIHKEGCVEKIGGWLRKNVLVVAAAALGIAFVEVLGIVFACCLVKSIRSGYEVMNRISGASELTATMGEADGGEKVWLQPGDLAPAPVDTPSSEDFRPNMSKGEELFTGVVPILVELDGDVNGQKFSVSGEGEGDATYGKLTLKFICTTGKLPVPWPTLVTTLSYGVQCFSRYPDHMKQHDFFKSAMPEGYVQERTIFYKDDGNYKTRAEVKFEGDTLVNRIELKGIDFKEDGNILGHKMEYNYNSHNVYIMADKPKNGIKVNFKIRHNIKDGSVQLADHYQQNTPIGDGPVLLPDNHYLSTQSALSKDPNEKRDHMILLEFVTAAGITHGMDELYK

SEQ ID NO: 9 - protein, 794 aa, Artificial Sequence
  TLR9signal-EYFP-TLR9Zloop-CD63-GFP2
MGFCRSALHPLSLLVQAIMLAMTLAMVSKGEELFTGVVPILVELDGDVNGHKFSVSGEGEGDATYGKLTLKFICTTGKLPVPWPTLVTTFGYGLQCFARYPDHMKQHDFFKSAMPEGYVQERTIFFKDDGNYKTRAEVKFEGDTLVNRIELKGIDFKEDGNILGHKLEYNYNSHNVYIMADKQKNGIKVNFKIRHNIEDGSVQLADHYQQNTPIGDGPVLLPDNHYLSYQSALSKDPNEKRDHMVLLEFVTAAGITLGMDELYKSGLRSTGSRNRISGASELTATMGEADGGEKVWLQPGDLAPAPVDTPSSEDFRPNMAVEGGMKCVKFLLYVLLLAFCACAVGLIAVGVGAQLVLSQTIIQGATPGSLLPVVIIAVGVFLFLVAFVGCCGACKENYCLMITFAIFLSLIMLVEVAAAIAGYVFRDKVMSEFNNNFRQQMENYPKNNHTASILDRMQADFKCCGAANYTDWEKIPSMSKNRVPDSCCINVTVGCGINFNEKAIHKEGCVEKIGGWLRKNVLVVAAAALGIAFVEVLGIVFACCLVKSIRSGYEVMMSKGEELFTGVVPILVELDGDVNGQKFSVSGEGEGDATYGKLTLKFICTTGKLPVPWPTLVTTLSYGVQCFSRYPDHMKQHDFFKSAMPEGYVQERTIFYKDDGNYKTRAEVKFEGDTLVNRIELKGIDFKEDGNILGHKMEYNYNSHNVYIMADKPKNGIKVNFKIRHNIKDGSVQLADHYQQNTPIGDGPVLLPDNHYLSTQSALSKDPNEKRDHMILLEFVTAAGITHGMDELYK

SEQ ID NO: 10 - protein, 489 aa, Artificial Sequence
  CD63-TLR3Zloop-GFP2
MAVEGGMKCVKFLLYVLLLAFCACAVGLIAVGVGAQLVLSQTIIQGATPGSLLPVVIIAVGVFLFLVAFVGCCGACKENYCLMITFAIFLSLIMLVEVAAAIAGYVFRDKVMSEFNNNFRQQMENYPKNNHTASILDRMQADFKCCGAANYTDWEKIPSMSKNRVPDSCCINVTVGCGINFNEKAIHKEGCVEKIGGWLRKNVLVVAAAALGIAFVEVLGIVFACCLVKSIRSGYEVMSFTKQSISLASLPKMSKGEELFTGVVPILVELDGDVNGQKFSVSGEGEGDATYGKLTLKFICTTGKLPVPWPTLVTTLSYGVQCFSRYPDHMKQHDFFKSAMPEGYVQERTIFYKDDGNYKTRAEVKFEGDTLVNRIELKGIDFKEDGNILGHKMEYNYNSHNVYIMADKPKNGIKVNFKIRHNIKDGSVQLADHYQQNTPIGDGPVLLPDNHYLSTQSALSKDPNEKRDHMILLEFTAAGITHGMDELYK

SEQ ID NO: 11 - protein, 761 aa, Artificial Sequence
  TLR3signal-EYFP-TLR3Zloop-CD63-GFP2
MRQTLPCIYFWGGLLPFGMLCASMVSKGEELFTGVVPILVELDGDVNGHKFSVSGEGEGDATYGKLTLKFICTTGKLPVPWPTLVTTFGYGLQCFARYPDHMKQHDFFKSAMPEGYVQERTIFFKDDGNYKTRAEVKFEGDTLVNRIELKGIDFKEDGNILGHKLEYNYNSHNVYIMADKQKNGIKVNFKIRHNIEDGSVQLADHYQQNTPIGDGPVLLPDNHYLSYQSALSKDPNEKRDHMVLLEFVTAAGITLGMDELYKSGLRSTGSRSFTKQSISLASLPKMAVEGGMKCVKFLLYVLLLAFCACAVGLIAVGVGAQLVLSQTIIQGATPGSLLPVVIIAVGVFLFLVAFVGCCGACKENYCLMITFAIFLSLIMLVEVAAAIAGYVFRDKVMSEFNNNFRQQMENYPKNNHTASILDRMQADFKCCGAANYTDWEKIPSMSKNRVPDSCCINVTVGCGINFNEKAIHKEGCVEKIGGWLRKNVLVVAAAALGIAFVEVLGIVFACCLVKSIRSGYEVMMSKGEELFTGVVPILVELDGDVNGQKFSVSGEGEGDATYGKLTLKFICTTGKLPVPWPTLVTTLSYGVQCFSRYPDHMKQHDFFKSAMPEGYVQERTIFYKDDGNYKTRAEVKFEGDTLVNRIELKGIDFKEDGNILGHKMEYNYNSHNVYIMADKPKNGIKVNFKIRHNIKDGSVQLADHYQQNTPIGDGPVLLPDNHYLSTQSALSKDPNEKRDHMILLEFVTAAGITHGMDELYK

SEQ ID NO: 12 - protein, 500 aa, Artificial Sequence
  CD63-TLR3Zloop-scFv15
MAVEGGMKCVKFLLYVLLLAFCACAVGLIAVGVGAQLVLSQTIIQGATPGSLLPVVIIAVGVFLFLVAFVGCCGACKENYCLMITFAIFLSLIMLVEVAAAIAGYVFRDKVMSEFNNNFRQQMENYPKNNHTASILDRMQADFKCCGAANYTDWEKIPSMSKNRVPDSCCINVTVGCGINFNEKAIHKEGCVEKIGGWLRKNVLVVAAAALGIAFVEVLGIVFACCLVKSIRSGYEVMSFTKQSISLASLPKDIQMTQSPSSLSASVGDRVTITCRASQSIGLYLAWYQQKPGKAPKLLIYAASSLQSGVPSRFSGSGSGTDFTLTISSLQPEDFATYYCQQGNTLSYTFGQGTKVEIKRTVAGGSGGSGGSGGSEVQLVQSGAEVKKPGESLKISCKGSGYSFTNYWVGWVRQMPGKGLEWMGFIDPSDSYTNYAPSFQGQVTISADKSISTAYLQWSSLKASDTAMYYCARELYQGYMDTFDSWGQGTLVTVSSASTK

SEQ ID NO: 13 - protein, 738 aa, Artificial Sequence
  CD63-TLR3Zloop-GFP2-scFv15
MAVEGGMKCVKFLLYVLLLAFCACAVGLIAVGVGAQLVLSQTIIQGATPGSLLPVVIIAVGVFLFLVAFVGCCGACKENYCLMITFAIFLSLIMLVEVAAAIAGYVFRDKVMSEFNNNFRQQMENYPKNNHTASILDRMQADFKCCGAANYTDWEKIPSMSKNRVPDSCCINVTVGCGINFNEKAIHKEGCVEKIGGWLRKNVLVVAAAALGIAFVEVLGIVFACCLVKSIRSGYEVMSFTKQSISLASLPKMSKGEELFTGVVPILVELDGDVNGQKFSVSGEGEGDATYGKLTLKFICTTGKLPVPWPTLVTTLSYGVQCFSRYPDHMKQHDFFKSAMPEGYVQERTIFYKDDGNYKTRAEVKFEGDTLVNRIELKGIDFKEDGNILGHKMEYNYNSHNVYIMADKPKNGIKVNFKIRHNIKDGSVQLADHYQQNTPIGDGPVLLPDNHYLSTQSALSKDPNEKRDHMILLEFVTAAGITHGMDELYKDIQMTQSPSSLSASVGDRVTITCRASQSIGLYLAWYQQKPGKAPKLLIYAASSLQSGVPSRFSGSGSGTDFTLTISSLQPEDFATYYCQQGNTLSYTFGQGTKVEIKRTVAGGSGGSGGSGGSEVQLVQSGAEVKKPGESLKISCKGSGYSFTNYWVGWVRQMPGKGLEWMGFIDPSDSYTNYAPSFQGQVTISADKSISTAYLQWSSLKASDTAMYYCARELYQGYMDTFDSWGQGTLVTVSSASTK

SEQ ID NO: 14 - protein, 1009 aa, Artificial Sequence
  TLR3signal-scFv15-EYFP-TLR3Zloop-CD63-GFP2
MRQTLPCIYFWGGLLPFGMLCASDIQMTQSPSSLSASVGDRVTITCRASQSIGLYLAWYQQKPGKAPKLLIYAASSLQSGVPSRFSGSGSGTDFTLTISSLQPEDFATYYCQQGNTLSYTFGQGTKVEIKRTVAGGSGGSGGSGGSEVQLVQSGAEVKKPGESLKISCKGSGYSFTNYWVGWVRQMPGKGLEWMGFIDPSDSYTNYAPSFQGQVTISADKSISTAYLQWSSLKASDTAMYYCARELYQGYMDTFDSWGQGTLVTVSSASTKMVSKGEELFTGVVPILVELDGDVNGHKFSVSGEGEGDATYGKLTLKFICTTGKLPVPWPTLVTTFGYGLQCFARYPDHMKQHDFFKSAMPEGYVQERTIFFKDDGNYKTRAEVKFEGDTLVNRIELKGIDFKEDGNILGHKLEYNYNSHNVYIMADKQKNGIKVNFKIRHNIEDGSVQLADHYQQNTPIGDGPVLLPDNHYLSYQSALSKDPNEKRDHMVLLEFVTAAGITLGMDELYKSGLRSTGSRSFTKQSISLASLPKMAVEGGMKCVKFLLYVLLLAFCACAVGLIAVGVGAQLVLSQTIIQGATPGSLLPVVIIAVGVFLFLVAFVGCCGACKENYCLMITFAIFLSLIMLVEVAAAIAGYVFRDKVMSEFNNNFRQQMENYPKNNHTASILDRMQADFKCCGAANYTDWEKIPSMSKNRVPDSCCINVTVGCGINFNEKAIHKEGCVEKIGGWLRKNVLVVAAAALGIAFVEVLGIVFACCLVKSIRSGYEVMMSKGEELFTGVVPILVELDGDVNGQKFSVSGEGEGDATYGKLTLKFICTTGKLPVPWPTLVTTLSYGVQCFSRYPDHMKQHDFFKSAMPEGYVQERTIFYKDDGNYKTRAEVKFEGDTLVNRIELKGIDFKEDGNILGHKMEYNYNSHNVYIMADKPKNGIKVNFKIRHNIKDGSVQLADHYQQNTPIGDGPVLLPDNHYLSTQSALSKDPNEKRDHMILLEFVTAAGITHGMDELYK

SEQ ID NO: 15 - protein, 522 aa, Artificial Sequence
  TLR3signal-scFv15-TLR3Zloop-CD63
MRQTLPCIYFWGGLLPFGMLCASDIQMTQSPSSLSASVGDRVTITCRASQSIGLYLAWYQQKPGKAPKLLIYAASSLQSVPSRFSGSGSGTDFTLTISSLQPEDFATYYCQQGNTLSYTFGQGTKVEIKRTVAGGSGGSGGSGGSEVQLVQSGAEVKKPGESLKISCKGSGYSFTNYWVGWVRQMPGKGLEWMGFIDPSDSYTNYAPSFQGQVTISADKSISTAYLQWSSLKASDTAMYYCARELYQGYMDTFDSWGQGTLVTVSSASTKSFTKQSISLASLPKMAVEGGMKCVKFLLYVLLLAFCACAVGLIAVGVGAQLVLSQTIIQGATPGSLLPVVIIAVGVFLFLVAFVGCCGACKENYCLMITFAIFLSLIMLVEVAAAIAGYVFRDKVMSEFNNNFRQQMENYPKNNHTASILDRMQADFKCCGAANYTDWEKIPSMSKNRVPDSCCINVTVGCGINFNEKAIHKEGCVEKIGGWLRKNVLVVAAAALGIAFVEVLGIVFACCLVKSIRSGYEVM

SEQ ID NO: 16 - protein, 503 aa, Artificial Sequence
  CD63-TLR3Zloop-scFv12
MAVEGGMKCVKFLLYVLLLAFCACAVGLIAVGVGAQLVLSQTIIQGATPGSLLPVVIIAVGVFLFLVAFVGCCGACKENYCLMITFAIFLSLIMLVEVAAAIAGYVFRDKVMSEFNNNFRQQMENYPKNNHTASILDRMQADFKCCGAANYTDWEKIPSMSKNRVPDSCCINVTVGCGINFNEKAIHKEGCVEKIGGWLRKNVLVVAAAALGIAFVEVLGIVFACCLVKSIRSGYEVMSFTKQSISLASLPKQSVLTQPPSVSVAPGQTARISCSGDNIGSYYVHWYQQKPGQAPVLVIYEDSERPSGIPERFSGSNSGNTATLTISGTQAEDEADYYCSSYDDPNFQVFGGGTKLTVLGQPKAAGGSGGSGGSGGSQVQLQQSGPGLVKPSQTLSLTCAISGDSVSSNSAAWGWIRQSPGRGLEWLGIIQKRSKWYNNYAVSVKSRITINPDTSKNQFSLQLNSVTPEDTAVYYCARYSYPFYSIDYWGQGTLVTVSSASTK

SEQ ID NO: 17 - protein, 741 aa, Artificial Sequence
  CD63-TLR3Zloop-GFP2-scFv12
MAVEGGMKCVKFLLYVLLLAFCACAVGLIAVGVGAQLVLSQTIIQGATPGSLLPVVIIAVGVFLFLVAFVGCCGACKENYCLMITFAIFLSLIMLVEVAAAIAGYVFRDKVMSEFNNNFRQQMENYPKNNHTASILDRMQADFKCCGAANYTDWEKIPSMSKNRVPDSCCINVTVGCGINFNEKAIHKEGCVEKIGGWLRKNVLVVAAAALGIAFVEVLGIVFACCLVKSIRSGYEVMSFTKQSISLASLPKMSKGEELFTGVVPILVELDGDVNGQKFSVSGEGEGDATYGKLTLKFICTTGKLPVPWPTLVTTLSYGVQCFSRYPDHMKQHDFFKSAMPEGYVQERTIFYKDDGNYKTRAEVKFEGDTLVNRIELKGIDFKEDGNILGHKMEYNYNSHNVYIMADKPKNGIKVNFKIRHNIKDGSVQLADHYQQNTPIGDGPVLLPDNHYLSTQSALSKDPNEKRDHMILLEFVTAAGITHGMDELYKQSVLTQPPSVSVAPGQTARISCSGDNIGSYYVHWYQQKPGQAPVLVIYEDSERPSGIPERFSGSNSGNTATLTISGTQAEDEADYYCSSYDDPNFQVFGGGTKLTVLGQPKAAGGSGGSGGSGGSQVQLQQSGPGLVKPSQTLSLTCAISGDSVSSNSAAWGWIRQSPGRGLEWLGIIQKRSKWYNNYAVSVKSRITINPDTSKNQFSLQLNSVTPEDTAVYYCARYSYPFYSIDYWGQGTLVTVSSASTK

SEQ ID NO: 18 - protein, 1012 aa, Artificial Sequence
  TLR3signal-scFv12-EYFP-TLR3Zloop-CD63-GFP2
MRQTLPCIYFWGGLLPFGMLCASQSVLTQPPSVSVAPGQTARISCSGDNIGSYYVHWYQQKPGQAPVLVIYEDSERPSGIPERFSGSNSGNTATLTISGTQAEDEADYYCSSYDDPNFQVFGGGTKLTVLGQPKAAGGSGGSGGSGGSQVQLQQSGPGLVKPSQTLSLTCAISGDSVSSNSAAWGWIRQSPGRGLEWLGIIQKRSKWYNNYAVSVKSRITINPDTSKNQFSLQLNSVTPEDTAVYYCARYSYPFYSIDYWGQGTLVTVSSASTKMVSKGEELFTGVVPILVELDGDVNGHKFSVSGEGEGDATYGKLTLKFICTTGKLPVPWPTLVTTFGYGLQCFARYPDHMKQHDFFKSAMPEGYVQERTIFFKDDGNYKTRAEVKFEGDTLVNRIELKGIDFKEDGNILGHKLEYNYNSHNVYIMADKQKNGIKVNFKIRHNIEDGSVQLADHYQQNTPIGDGPVLLPDNHYLSYQSALSKDPNEKRDHMVLLEFVTAAGITLGMDELYKSGLRSTGSRSFTKQSISLASLPKMAVEGGMKCVKFLLYVLLLAFCACAVGLIAVGVGAQLVLSQTIIQGATPGSLLPVVIIAVGVFLFLVAFVGCCGACKENYCLMITFAIFLSLIMLVEVAAAIAGYVFRDKVMSEFNNNFRQQMENYPKNNHTASILDRMQADFKCCGAANYTDWEKIPSMSKNRVPDSCCINVTVGCGINFNEKAIHKEGCVEKIGGWLRKNVLVVAAAALGIAFVEVLGIVFACCLVKSIRSGYEVMMSKGEELFTGVVPILVELDGDVNGQKFSVSGEGEGDATYGKLTLKFICTTGKLPVPWPTLVTTLSYGVQCFSRYPDHMKQHDFFKSAMPEGYVQERTIFYKDDGNYKTRAEVKFEGDTLVNRIELKGIDFKEDGNILGHKMEYNYNSHNVYIMADKPKNGIKVNFKIRHNIKDGSVQLADHYQQNTPIGDGPVLLPDNHYLSTQSALSKDPNEKRDHMILLEFVTAAGITHGMDELYK

SEQ ID NO: 19 - protein, 526 aa, Artificial Sequence
  TLR3signal-scFv12-TLR3Zloop-CD63
MRQTLPCIYFWGGLLPFGMLCASQSVLTQPPSVSVAPGQTARISCSGDNIGSYYVHWYQQKPGQAPVLVIYEDSERPSGIPERFSGSNSGNTATLTISGTQAEDEADYYCSSYDDPNFQVFGGGTKLTVLGQPKAAGGSGGSGGSGGSQVQLQQSGPGLVKPSQTLSLTCAISGDSVSSNSAAWGWIRQSPGRGLEWLGIIQKRSKWYNNYAVSVKSRITINPDTSKNQFSLQLNSVTPEDTAVYYCARYSYPFYSIDYWGQGTLVTVSSASTKSFTKQSISLASLPKMAVEGGMKCVKFLLYVLLLAFCACAVGLIAVGVGAQLVLSQTIIQGATPGSLLPVVIIAVGVFLFLVAFVGCCGACKENYCLMITFAIFLSLIMLVEVAAAIAGYVFRDKVMSEFNNNFRQQMENYPKNNHTASILDRMQADFKCCGAANYTDWEKIPSMSKNRVPDSCCINVTVGCGINFNEKAIHKEGCVEKIGGWLRKNVLVVAAAALGIAFVEVLGIVFACCLVKSIRSGYEVM

SEQ ID NO: 20 - protein, 500 aa, Artificial Sequence
  CD63-TLR3Zloop-scFv1068
MAVEGGMKCVKFLLYVLLLAFCACAVGLIAVGVGAQLVLSQTIIQGATPGSLLPVVIIAVGVFLFLVAFVGCCGACKENYCLMITFAIFLSLIMLVEVAAAIAGYVFRDKVMSEFNNNFRQQMENYPKNNHTASILDRMQADFKCCGAANYTDWEKIPSMSKNRVPDSCCINVTVGCGINFNEKAIHKEGCVEKIGGWLRKNVLVVAAAALGIAFVEVLGIVFACCLVKSIRSGYEVMSFTKQSISLASLPKDIQMTQSPASLSASVGETVTITCRASGNIHNYLAWYQQKQGKSPQLLVYNAKTLADGVPSRFSGSESGTQYSLKINSLQPEDFGSYYCQHFWSTPFTFGSGTKLELKRGTVAAGGSGGSGGSGGSQVQLQQPGAELVQPGTSVRLSCKASGYIFTTYWIHWVKQRPGQGLEWIGEINPNNGRINYNEKFKTKATLTVDKSSSTAYMQLSSLTSEDSAVYYCTRVGVMITTFPYWGQGTLVTVSAASTK

SEQ ID NO: 21 - protein, 738 aa, Artificial Sequence
  CD63-TLR3Zloop-GFP2-scFv1068
MAVEGGMKCVKFLLYVLLLAFCACAVGLIAVGVGAQLVLSQTIIQGATPGSLLPVVIIAVGVFLFLVAFVGCCGACKENYCLMITFAIFLSLIMLVEVAAAIAGYVFRDKVMSEFNNNFRQQMENYPKNNHTASILDRMQADFKCCGAANYTDWEKIPSMSKNRVPDSCCINVTVGCGINFNEKAIHKEGCVEKIGGWLRKNVLVVAAAALGIAFVEVLGIVFACCLVKSIRSGYEVMSFTKQSISLASLPKMSKGEELFTGVVPILVELDGDVNGQKFSVSGEGEGDATYGKLTLKFICTTGKLPVPWPTLVTTLSYGVQCFSRYPDHMKQHDFFKSAMPEGYVQERTIFYKDDGNYKTRAEVKFEGDTLVNRIELKGIDFKEDGNILGHKMEYNYNSHNVYIMADKPKNGIKVNFKIRHNIKDGSVQLADHYQQNTPIGDGPVLLPDNHYLSTQSALSKDPNEKRDHMILLEFVTAAGITHGMDELYKDIQMTQSPASLSASVGETVTITCRASGNIHNYLAWYQQKQGKSPQLLVYNAKTLADGVPSRFSGSESGTQYSLKINSLQPEDFGSYYCQHFWSTPFTFGSGTKLELKRGTVAAGGSGGSGGSGGSQVQLQQPGAELVQPGTSVRLSCKASGYIFTTYWIHWVKQRPGQGLEWIGEINPNNGRINYNEKFKTKATLTVDKSSSTAYMQLSSLTSEDSAVYYCTRVGVMITTFPYWGQGTLVTVSAASTK

SEQ ID NO: 22 - protein, 1009 aa, Artificial Sequence
  TLR3signal-scFv1068-EYFP-TLR3Zloop-CD63-GFP2
MRQTLPCIYFWGGLLPFGMLCASDIQMTQSPASLSASVGETVTITCRASGNIHNYLAWYQQKQGKSPQLLVYNAKTLADGVPSRFSGSESGTQYSLKINSLQPEDFGSYYCQHFWSTPFTFGSGTKLELKRGTVAAGGSGGSGGSGGSQVQLQQPGAELVQPGTSVRLSCKASGYIFTTYWIHWVKQRPGQGLEWIGEINPNNGRINYNEKFKTKATLTVDKSSSTAYMQLSSLTSEDSAVYYCTRVGVMITTFPYWGQGTLVTVSAASTKMVSKGEELFTGVVPILVELDGDVNGHKFSVSGEGEGDATYGKLTLKFICTTGKLPVPWPTLVTTFGYGLQCFARYPDHMKQHDFFKSAMPEGYVQERTIFFKDDGNYKTRAEVKFEGDTLVNRIELKGIDFKEDGNILGHKLEYNYNSHNVYIMADKQKNGIKVNFKIRHNIEDGSVQLADHYQQNTPIGDGPVLLPDNHYLSYQSALSKDPNEKRDHMVLLEFVTAAGITLGMDELYKSGLRSTGSRSFTKQSISLASLPKMAVEGGMKCVKFLLYVLLLAFCACAVGLIAVGVGAQLVLSQTIIQGATPGSLLPVVIIAVGVFLFLVAFVGCCGACKENYCLMITFAIFLSLIMLVEVAAAIAGYVFRDKVMSEFNNNFRQQMENYPKNNHTASILDRMQADFKCCGAANYTDWEKIPSMSKNRVPDSCCINVTVGCGINFNEKAIHKEGCVEKIGGWLRKNVLVVAAAALGIAFVEVLGIVFACCLVKSIRSGYEVMMSKGEELFTGVVPILVELDGDVNGQKFSVSGEGEGDATYGKLTLKFICTTGKLPVPWPTLVTTLSYGVQCFSRYPDHMKQHDFFKSAMPEGYVQERTIFYKDDGNYKTRAEVKFEGDTLVNRIELKGIDFKEDGNILGHKMEYNYNSHNVYIMADKPKNGIKVNFKIRHNIKDGSVQLADHYQQNTPIGDGPVLLPDNHYLSTQSALSKDPNEKRDHMILLEFVTAAGITHGMDELYK

SEQ ID NO: 23 - protein, 523 aa, Artificial Sequence
  TLR3signal-scFv1068-TLR3Zloop-CD63
MRQTLPCIYFWGGLLPFGMLCASDIQMTQSPASLSASVGETVTITCRASGNIHNYLAWYQQKQGKSPQLLVYNAKTLADGVPSRFSGSESGTQYSLKINSLQPEDFGSYYCQHFWSTPFTFGSGTKLELKRGTVAAGGSGGSGGSGGSQVQLQQPGAELVQPGTSVRLSCKASGYIFTTYWIHWVKQRPGQGLEWIGEINPNNGRINYNEKFKTKATLTVDKSSSTAYMQLSSLTSEDSAVYYCTRVGVMITTFPYWGQGTLVTVSAASTKSFTKQSISLASLPKMAVEGGMKCVKFLLYVLLLAFCACAVGLIAVGVGAQLVLSQTIIQGATPGSLLPVVIIAVGVFLFLVAFVGCCGACKENYCLMITFAIFLSLIMLVEVAAAIAGYVFRDKVMSEFNNNFRQQMENYPKNNHTASILDRMQADFKCCGAANYTDWEKIPSMSKNRVPDSCCINVTVGCGINFNEKAIHKEGCVEKIGGWLRKNVLVVAAAALGIAFVEVLGIVFACCLVKSIRSGYEVM

SEQ ID NO: 24 - protein, 526 aa, Artificial Sequence
  CD9-TLR7Zloop-GFP2
MPVKGGTKCIKYLLFGFNFIFWLAGIAVLAIGLWLRFDSQTKSIFEQETNNNNSSFYTGVYILIGAGALMMLVGFLGCCGAVQESQCMLGLFFGFLLVIFAIEIAAAIWGYSHKDEVIKEVQEFYKDTYNKLKTKDEPQRETLKAIHYALNCCGLAGGVEQFISDICPKKDVLETFTVKSCPDAIKEVFDNKFHIIGAVGIGIAVVMIFGMIFSMILCCAIRRNREMVNKISPSGDSSEVGFCSNARTSVESYEPQVLEQLHYFRYDKYARSCRFKNKEASFMSVNESMSKGEELFTGVVPILVELDGDVNGQKFSVSGEGEGDATYGKLTLKFICTTGKLPVPWPTLVTTLSYGVQCFSRYPDHMKQHDFFKSAMPEGYVQERTIFYKDDGNYKTRAEVKFEGDTLVNRIELKGIDFKEDGNILGHKMEYNYNSHNVYIMADKPKNGIKVNFKIRHNIKDGSVQLADHYQQNTPIGDGPVLLPDNHYLSTQSALSKDPNEKRDHMILLEFVTAAGITHGMDELYK

SEQ ID NO: 25 - protein, 800 aa, Artificial Sequence
  TLR7signal-EYFP-CD9-TLR7Zloop-GFP2
MVFPMWTLKRQILILFNIILISKLLGMVSKGEELFTGVVPILVELDGDVNGHKFSVSGEGEGDATYGKLTLKFICTTGKLPVPWPTLVTTFGYGLQCFARYPDHMKQHDFFKSAMPEGYVQERTIFFKDDGNYKTRAEVKFEGDTLVNRIELKGIDFKEDGNILGHKLEYNYNSHNVYIMADKQKNGIKVNFKIRHNIEDGSVQLADHYQQNTPIGDGPVLLPDNHYLSYQSALSKDPNEKRDHMVLLEFVTAAGITLGMDELYKSGLRSTGSRMPVKGGTKCIKYLLFGFNFIFWLAGIAVLAIGLWLRFDSQTKSIFEQETNNNNSSFYTGVYILIGAGALMMLVGFLGCCGAVQESQCMLGLFFGFLLVIFAIEIAAAIWGYSHKDEVIKEVQEFYKDTYNKLKTKDEPQRETLKAIHYALNCCGLAGGVEQFISDICPKKDVLETFTVKSCPDAIKEVFDNKFHIIGAVGIGIAVVMIFGMIFSMILCCAIRRNREMVNKISPSGDSSEVGFCSNARTSVESYEPQVLEQLHYFRYDKYARSCRFKNKEASFMSVNESMSKGEELFTGVVPILVELDGDVNGQKFSVSGEGEGDATYGKLTLKFICTTGKLPVPWPTLVTTLSYGVQCFSRYPDHMKQHDFFKSAMPEGYVQERTIFYKDDGNYKTRAEVKFEGDTLVNRIELKGIDFKEDGNILGHKMEYNYNSHNVYIMADKPKNGIKVNFKIRHNIKDGSVQLADHYQQNTPIGDGPVLLPDNHYLSTQSALSKDPNEKRDHMILLEFVTAAGITHGMDELYK

SEQ ID NO: 26 - protein, 800 aa, Artificial Sequence
  TLR7signal-EYFP-TLR7Zloop-CD9-GFP2
MVFPMWTLKRQILILFNIILISKLLGMVSKGEELFTGVVPILVELDGDVNGHKFSVSGEGEGDATYGKLTLKFICTTGKLPVPWPTLVTTFGYGLQCFARYPDHMKQHDFFKSAMPEGYVQERTIFFKDDGNYKTRAEVKFEGDTLVNRIELKGIDFKEDGNILGHKLEYNYNSHNVYIMADKQKNGIKVNFKIRHNIEDGSVQLADHYQQNTPIGDGPVLLPDNHYLSYQSALSKDPNEKRDHMVLLEFVTAAGITLGMDELYKSGLRSTGSRNKISPSGDSSEVGFCSNARTSVESYEPQVLEQLHYFRYDKYARSCRFKNKEASFMSVNESMPVKGGTKCIKYLLFGFNFIFWLAGIAVLAIGLWLRFDSQTKSIFEQETNNNNSSFYTGVYILIGAGALMMLVGFLGCCGAVQESQCMLGLFFGFLLVIFAIEIAAAIWGYSHKDEVIKEVQEFYKDTYNKLKTKDEPQRETLKAIHYALNCCGLAGGVEQFISDICPKKDVLETFTVKSCPDAIKEVFDNKFHIIGAVGIGIAVVMIFGMIFSMILCCAIRRNREMVMSKGEELFTGVVPILVELDGDVNGQKFSVSGEGEGDATYGKLTLKFICTTGKLPVPWPTLVTTLSYGVQCFSRYPDHMKQHDFFKSAMPEGYVQERTIFYKDDGNYKTRAEVKFEGDTLVNRIELKGIDFKEDGNILGHKMEYNYNSHNVYIMADKPKNGIKVNFKIRHNIKDGSVQLADHYQQNTPIGDGPVLLPDNHYLSTQSALSKDPNEKRDHMILLEFVTAAGITHGMDELYK

SEQ ID NO: 27 - protein, 517 aa, Artificial Sequence
  CD9-TLR8Zloop-GFP2
MPVKGGTKCIKYLLFGFNFIFWLAGIAVLAIGLWLRFDSQTKSIFEQETNNNNSSFYTGVYILIGAGALMMLVGFLGCCGAVQESQCMLGLFFGFLLVIFAIEIAAAIWGYSHKDEVIKEVQEFYKDTYNKLKTKDEPQRETLKAIHYALNCCGLAGGVEQFISDICPKKDVLETFTVKSCPDAIKEVFDNKFHIIGAVGIGIAVVMIFGMIFSMILCCAIRRNREMVNRISPLVKDTRQSYANSSSFQRHIRKRRSTDFEFDPHSNFYHFTRPLIKPQMSKGEELFTGVVPILVELDGDVNGQKFSVSGEGEGDATYGKLTLKFICTTGKLPVPWPTLVTTLSYGVQCFSRYPDHMKQHDFFKSAMPEGYVQERTIFYKDDGNYKTRAEVKFEGDTLVNRIELKGIDFKEDGNILGHKMEYNYNSHNVYIMADKPKNGIKVNFKIRHNIKDGSVQLADHYQQNTPIGDGPVLLPDNHYLSTQSALSKDPNEKRDHMILLEFVTAAGITHGMDELYK

SEQ ID NO: 28 - protein, 791 aa, Artificial Sequence
  TLR8signal-EYFP-CD9-TLR8Zloop-GFP2
MENMFLQSSMLTCIFLLISGSCELCAMVSKGEELFTGVVPILVELDGDVNGHKFSVSGEGEGDATYGKLTLKFICTTGKLPVPWPTLVTTFGYGLQCFARYPDHMKQHDFFKSAMPEGYVQERTIFFKDDGNYKTRAEVKFEGDTLVNRIELKGIDFKEDGNILGHKLEYNYNSHNVYIMADKQKNGIKVNFKIRHNIEDGSVQLADHYQQNTPIGDGPVLLPDNHYLSYQSALSKDPNEKRDHMVLLEFVTAAGITLGMDELYKSGLRSTGSRMPVKGGTKCIKYLLFGFNFIFWLAGIAVLAIGLWLRFDSQTKSIFEQETNNNNSSFYTGVYILIGAGALMMLVGFLGCCGAVQESQCMLGLFFGFLLVIFAIEIAAAIWGYSHKDEVIKEVQEFYKDTYNKLKTKDEPQRETLKAIHYALNCCGLAGGVEQFISDICPKKDVLETFTVKSCPDAIKEVFDNKFHIIGAVGIGIAVVMIFGMIFSMILCCAIRRNREMVNRISPLVKDTRQSYANSSSFQRHIRKRRSTDFEFDPHSNFYHFTRPLIKPQMSKGEELFTGVVPILVELDGDVNGQKFSVSGEGEGDATYGKLTLKFICTTGKLPVPWPTLVTTLSYGVQCFSRYPDHMKQHDFFKSAMPEGYVQERTIFYKDDGNYKTRAEVKFEGDTLVNRIELKGIDFKEDGNILGHKMEYNYNSHNVYIMADKPKNGIKVNFKIRHNIKDGSVQLADHYQQNTPIGDGPVLLPDNHYLSTQSALSKDPNEKRDHMILLEFVTAAGITHGMDELYK

SEQ ID NO: 29 - protein, 791 aa, Artificial Sequence
  TLR8signal-EYFP-TLR8Zloop-CD9-GFP2
MENMFLQSSMLTCIFLLISGSCELCAMVSKGEELFTGVVPILVELDGDVNGHKFSVSGEGEGDATYGKLTLKFICTTGKLPVPWPTLVTTFGYGLQCFARYPDHMKQHDFFKSAMPEGYVQERTIFFKDDGNYKTRAEVKFEGDTLVNRIELKGIDFKEDGNILGHKLEYNYNSHNVYIMADKQKNGIKVNFKIRHNIEDGSVQLADHYQQNTPIGDGPVLLPDNHYLSYQSALSKDPNEKRDHMVLLEFVTAAGITLGMDELYKSGLRSTGSRNRISPLVKDTRQSYANSSSFQRHIRKRRSTDFEFDPHSNFYHFTRPLIKPQMPVKGGTKCIKYLLFGFNFIFWLAGIAVLAIGLWLRFDSQTKSIFEQETNNNNSSFYTGVYILIGAGALMMLVGFLGCCGAVQESQCMLGLFFGFLLVIFAIEIAAAIWGYSHKDEVIKEVQEFYKDTYNKLKTKDEPQRETLKAIHYALNCCGLAGGVEQFISDICPKKDVLETFTVKSCPDAIKEVFDNKFHIIGAVGIGIAVVMIFGMIFSMILCCAIRRNREMVMSKGEELFTGVVPILVELDGDVNGQKFSVSGEGEGDATYGKLTLKFICTTGKLPVPWPTLVTTLSYGVQCFSRYPDHMKQHDFFKSAMPEGYVQERTIFYKDDGNYKTRAEVKFEGDTLVNRIELKGIDFKEDGNILGHKMEYNYNSHNVYIMADKPKNGIKVNFKIRHNIKDGSVQLADHYQQNTPIGDGPVLLPDNHYLSTQSALSKDPNEKRDHMILLEFVTAAGITHGMDELYK

SEQ ID NO: 30 - protein, 511 aa, Artificial Sequence
  CD9-TLR9Zloop-GFP2
MPVKGGTKCIKYLLFGFNFIFWLAGIAVLAIGLWLRFDSQTKSIFEQETNNNNSSFYTGVYILIGAGALMMLVGFLGCCGAVQESQCMLGLFFGFLLVIFAIEIAAAIWGYSHKDEVIKEVQEFYKDTYNKLKTKDEPQRETLKAIHYALNCCGLAGGVEQFISDICPKKDVLETFTVKSCPDAIKEVFDNKFHIIGAVGIGIAVVMIFGMIFSMILCCAIRRNREMVNRISGASELTATMGEADGGEKVWLQPGDLAPAPVDTPSSEDFRPNMSKGEELFTGVVPILVELDGDVNGQKFSVSGEGEGDATYGKLTLKFICTTGKLPVPWPTLVTTLSYGVQCFSRYPDHMKQHDFFKSAMPEGYVQERTIFYKDDGNYKTRAEVKFEGDTLVNRIELKGIDFKEDGNILGHKMEYNYNSHNVYIMADKPKNGIKVNFKIRHNIKDGSVQLADHYQQNTPIGDGPVLLPDNHYLSTQSALSKDPNEKRDHMILLEFVTAAGITHGMDELYK

SEQ ID NO: 31 - protein, 784 aa, Artificial Sequence
  TLR9signal-EYFP-CD9-TLR9Zloop-GFP2
MGFCRSALHPLSLLVQAIMLAMTLAMVSKGEELFTGVVPILVELDGDVNGHKFSVSGEGEGDATYGKLTLKFICTTGKLPVPWPTLVTTFGYGLQCFARYPDHMKQHDFFKSAMPEGYVQERTIFFKDDGNYKTRAEVKFEGDTLVNRIELKGIDFKEDGNILGHKLEYNYNSHNVYIMADKQKNGIKVNFKIRHNIEDGSVQLADHYQQNTPIGDGPVLLPDNHYLSYQSALSKDPNEKRDHMVLLEFVTAAGITLGMDELYKSGLRSTGSRMPVKGGTKCIKYLLFGFNFIFWLAGIAVLAIGLWLRFDSQTKSIFEQETNNNNSSFYTGVYILIGAGALMMLVGFLGCCGAVQESQCMLGLFFGFLLVIFAIEIAAAIWGYSHKDEVIKEVQEFYKDTYNKLKTKDEPQRETLKAIHYALNCCGLAGGVEQFISDICPKKDVLETFTVKSCPDAIKEVFDNKFHIIGAVGIGIAVVMIFGMIFSMILCCAIRRNREMVNRISGASELTATMGEADGGEKVWLQPGDLAPAPVDTPSSEDFRPNMSKGEELFTGVVPILVELDGDVNGQKFSVSGEGEGDATYGKLTLKFICTTGKLPVPWPTLVTTLSYGVQCFSRYPDHMKQHDFFKSAMPEGYVQERTIFYKDDGNYKTRAEVKFEGDTLVNRIELKGIDFKEDGNILGHKMEYNYNSHNVYIMADKPKNGIKVNFKIRHNIKDGSVQLADHYQQNTPIGDGPVLLPDNHYLSTQSALSKDPNEKRDHMILLEFVTAAGITHGMDELYK

SEQ ID NO: 32 - protein, 784 aa, Artificial Sequence
  TLR9signal-EYFP-TLR9Zloop-CD9-GFP2
MGFCRSALHPLSLLVQAIMLAMTLAMVSKGEELFTGVVPILVELDGDVNGHKFSVSGEGEGDATYGKLTLKFICTTGKLPVPWPTLVTTFGYGLQCFARYPDHMKQHDFFKSAMPEGYVQERTIFFKDDGNYKTRAEVKFEGDTLVNRIELKGIDFKEDGNILGHKLEYNYNSHNVYIMADKQKNGIKVNFKIRHNIEDGSVQLADHYQQNTPIGDGPVLLPDNHYLSYQSALSKDPNEKRDHMVLLEFVTAAGITLGMDELYKSGLRSTGSRNRISGASELTATMGEADGGEKVWLQPGDLAPAPVDTPSSEDFRPNMPVKGGTKCIKYLLFGFNFIFWLAGIAVLAIGLWLRFDSQTKSIFEQETNNNNSSFYTGVYILIGAGALMMLVGFLGCCGAVQESQCMLGLFFGFLLVIFAIEIAAAIWGYSHKDEVIKEVQEFYKDTYNKLKTKDEPQRETLKAIHYALNCCGLAGGVEQFISDICPKKDVLETFTVKSCPDAIKEVFDNKFHIIGAVGIGIAVVMIFGMIFSMILCCAIRRNREMVMSKGEELFTGVVPILVELDGDVNGQKFSVSGEGEGDATYGKLTLKFICTTGKLPVPWPTLVTTLSYGVQCFSRYPDHMKQHDFFKSAMPEGYVQERTIFYKDDGNYKTRAEVKFEGDTLVNRIELKGIDFKEDGNILGHKMEYNYNSHNVYIMADKPKNGIKVNFKIRHNIKDGSVQLADHYQQNTPIGDGPVLLPDNHYLSTQSALSKDPNEKRDHMILLEFVTAAGITHGMDELYK

SEQ ID NO: 33 - protein, 480 aa, Artificial Sequence
  CD9-TLR3Zloop-GFP2
MPVKGGTKCIKYLLFGFNFIFWLAGIAVLAIGLWLRFDSQTKSIFEQETNNNNSSFYTGVYILIGAGALMMLVGFLGCCGAVQESQCMLGLFFGFLLVIFAIEIAAAIWGYSHKDEVIKEVQEFYKDTYNKLKTKDEPQRETLKAIHYALNCCGLAGGVEQFISDICPKKDVLETFTVKSCPDAIKEVFDNKFHIIGAVGIGIAVVMIFGMIFSMILCCAIRRNREMVSFTKQSISLASLPKMSKGEELFTGVVPILVELDGDVNGQKFSVSGEGEGDATYGKLTLKFICTTGKLPVPWPTLVTTLSYGVQCFSRYPDHMKQHDFFKSAMPEGYVQERTIFYKDDGNYKTRAEVKFEGDTLVNRIELKGIDFKEDGNILGHKMEYNYNSHNVYIMADKPKNGIKVNFKIRHNIKDGSVQLADHYQQNTPIGDGPVLLPDNHYLSTQSALSKDPNEKRDHMILLEFVTAAGITHGMDELYK

SEQ ID NO: 34 - protein, 750 aa, Artificial Sequence
  TLR3signal-EYFP-TLR3Zloop-CD9-GFP2
MRQTLPCIYFWGGLLPFGMLCASMVSKGEELFTGVVPILVELDGDVNGHKFSVSGEGEGDATYGKLTLKFICTTGKLPVPWPTLVTTFGYGLQCFARYPDHMKQHDFFKSAMPEGYVQERTIFFKDDGNYKTRAEVKFEGDTLVNRIELKGIDFKEDGNILGHKLEYNYNSHNVYIMADKQKNGIKVNFKIRHNIEDGSVQLADHYQQNTPIGDGPVLLPDNHYLSYQSALSKDPNEKRDHMVLLEFVTAAGITLGMDELYKSGLRSTGSRSFTKQSISLASLPKMPVKGGTKCIKYLLFGFNFIFWLAGIAVLAIGLWLRFDSQTKSIFEQETNNNNSSFYTGVYILIGAGALMMLVGFLGCCGAVQESQCMLGLFFGFLLVIFAIEIAAAIWGYSHKDEVIKEVQEFYKDTYNKLKTKDEPQRETLKAIHYALNCCGLAGGVEQFISDICPKKDVLETFTVKSCPDAIKEVFDNKFHIIGAVGIGIAVVMIFGMIFSMILCCAIRRNREMVMSKGEELFTGVVPILVELDGDVNGQKFSVSGEGEGDATYGKLTLKFICTTGKLPVPWPTLVTTLSYGVQCFSRYPDHMKQHDFFKSAMPEGYVQERTIFYKDDGNYKTRAEVKFEGDTLVNRIELKGIDFKEDGNILGHKMEYNYNSHNVYIMADKPKNGIKVNFKIRHNIKDGSVQLADHYQQNTPIGDGPVLLPDNHYLSTQSALSKDPNEKRDHMILLEFVTAAGITGMDELYK

SEQ ID NO: 35 - protein, 490 aa, Artificial Sequence
  CD9-TLR3Zloop-scFv15
MPVKGGTKCIKYLLFGFNFIFWLAGIAVLAIGLWLRFDSQTKSIFEQETNNNNSSFYTGVYILIGAGALMMLVGFLGCCGAVQESQCMLGLFFGFLLVIFAIEIAAAIWGYSHKDEVIKEVQEFYKDTYNKLKTKDEPQRETLKAIHYALNCCGLAGGVEQFISDICPKKDVLETFTVKSCPDAIKEVFDNKFHIIGAVGIGIAVVMIFGMIFSMILCCAIRRNREMVSFTKQSISLASLPKDIQMTQSPSSLSASVGDRVTITCRASQSIGLYLAWYQQKPGKAPKLLIYAASSLQSGVPSRFSGSGSGTDFTLTISSLQPEDFATYYCQQGNTLSYTFGQGTKVEIKRTVAGGSGGSGGSGGSEVQLVQSGAEVKKPGESLKISCKGSGYSFTNYWVGWVRQMPGKGLEWMGFIDPSDSYTNYAPSFQGQVTISADKSISTAYLQWSSLKASDTAMYYCARELYQGYMDTFDSWGQGTLVTVSSASTK

SEQ ID NO: 36 - protein, 728 aa, Artificial Sequence
  CD9-TLR3Zloop-GFP2-scFv15
MPVKGGTKCIKYLLFGFNFIFWLAGIAVLAIGLWLRFDSQTKSIFEQETNNNNSSFYTGVYILIGAGALMMLVGFLGCCGAVQESQCMLGLFFGFLLVIFAIEIAAAIWGYSHKDEVIKEVQEFYKDTYNKLKTKDEPQRETLKAIHYALNCCGLAGGVEQFISDICPKKDVLETFTVKSCPDAIKEVFDNKFHIIGAVGIGIAVVMIFGMIFSMILCCAIRRNREMVSFTKQSISLASLPKMSKGEELFTGVVPILVELDGDVNGQKFSVSGEGEGDATYGKLTLKFICTTGKLPVPWPTLVTTLSYGVQCFSRYPDHMKQHDFFKSAMPEGYVQERTIFYKDDGNYKTRAEVKFEGDTLVNRIELKGIDFKEDGNILGHKMEYNYNSHNVYIMADKPKNGIKVNFKIRHNIKDGSVQLADHYQQNTPIGDGPVLLPDNHYLSTQSALSKDPNEKRDHMILLEFVTAAGITHGMDELYKDIQMTQSPSSLSASVGDRVTITCRASQSIGLYLAWYQQKPGKAPKLLIYAASSLQSGVPSRFSGSGSGTDFTLTISSLQPEDFATYYCQQGNTLSYTFGQGTKVEIKRTVAGGSGGSGGSGGSEVQLVQSGAEVKKPGESLKISCKGSGYSFTNYWVGWVRQMPGKGLEWMGFIDPSDSYTNYAPSFQGQVTISADKSISTAYLQWSSLKASDTAMYYCARELYQGYMDTFDSWGQGTLVTVSSASTK

SEQ ID NO: 37 - protein, 999 aa, Artificial Sequence
  TLR3signal-scFv15-EYFP-TLR3Zloop-CD9-GFP2
MRQTLPCIYFWGGLLPFGMLCASDIQMTQSPSSLSASVGDRVTITCRASQSIGLYLAWYQQKPGKAPKLLIYAASSLQSGVPSRFSGSGSGTDFTLTISSLQPEDFATYYCQQGNTLSYTFGQGTKVEIKRTVAGGSGGSGGSGGSEVQLVQSGAEVKKPGESLKISCKGSGYSFTNYWVGWVRQMPGKGLEWMGFIDPSDSYTNYAPSFQGQVTISADKSISTAYLQWSSLKASDTAMYYCARELYQGYMDTFDSWGQGTLVTVSSASTKMVSKGEELFTGVVPILVELDGDVNGHKFSVSGEGEGDATYGKLTLKFICTTGKLPVPWPTLVTTFGYGLQCFARYPDHMKQHDFFKSAMPEGYVQERTIFFKDDGNYKTRAEVKFEGDTLVNRIELKGIDFKEDGNILGHKLEYNYNSHNVYIMADKQKNGIKVNFKIRHNIEDGSVQLADHYQQNTPIGDGPVLLPDNHYLSYQSALSKDPNEKRDHMVLLEFVTAAGITLGMDELYKSGLRSTGSRSFTKQSISLASLPKMPVKGGTKCIKYLLFGFNFIFWLAGIAVLAIGLWLRFDSQTKSIFEQETNNNNSSFYTGVYILIGAGALMMLVGFLGCCGAVQESQCMLGLFFGFLLVIFAIEIAAAIWGYSHKDEVIKEVQEFYKDTYNKLKTKDEPQRETLKAIHYALNCCGLAGGVEQFISDICPKKDVLETFTVKSCPDAIKEVFDNKFHIIGAVGIGIAVVMIFGMIFSMILCCAIRRNREMVMSKGEELFTGVVPILVELDGDVNGQKFSVSGEGEGDATYGKLTLKFICTTGKLPVPWPTLVTTLSYGVQCFSRYPDHMKQHDFFKSAMPEGYVQERTIFYKDDGNYKTRAEVKFEGDTLVNRIELKGIDFKEDGNILGHKMEYNYNSHNVYIMADKPKNGIKVNFKIRHNIKDGSVQLADHYQQNTPIGDGPVLLPDNHYLSTQSALSKDPNEKRDHMILLEFVTAAGITHGMDELYK

SEQ ID NO: 38 - protein, 513 aa, Artificial Sequence
  TLR3signal-scFv15-TLR3Zloop-CD9
MRQTLPCIYFWGGLLPFGMLCASDIQMTQSPSSLSASVGDRVTITCRASQSIGLYLAWYQQKPGKAPKLLIYAASSLQSGVPSRFSGSGSGTDFTLTISSLQPEDFATYYCQQGNTLSYTFGQGTKVEIKRTVAGGSGGSGGSGGSEVQLVQSGAEVKKPGESLKISCKGSGYSFTNYWVGWVRQMPGKGLEWMGFIDPSDSYTNYAPSFQGQVTISADKSISTAYLQWSSLKASDTAMYYCARELYQGYMDTFDSWGQGTLVTVSSASTKSFTKQSISLASLPKMPVKGGTKCIKYLLFGFNFIFWLAGIAVLAIGLWLRFDSQTKSIFEQETNNNNSSFYTGVYILIGAGALMMLVGFLGCCGAVQESQCMLGLFFGFLLVIFAIEIAAAIWGYSHKDEVIKEVQEFYKDTYNKLKTKDEPQRETLKAIHYALNCCGLAGGVEQFISDICPKKDVLETFTVKSCPDAIKEVFDNKFHIIGAVGIGIAVVMIFGMIFSMILCCAIRRNREMV

SEQ ID NO: 39 - protein, 493 aa, Artificial Sequence
  CD9-TLR3Zloop-scFv12
MPVKGGTKCIKYLLFGFNFIFWLAGIAVLAIGLWLRFDSQTKSIFEQETNNNNSSFYTGVYILIGAGALMMLVGFLGCCGAVQESQCMLGLFFGFLLVIFAIEIAAAIWGYSHKDEVIKEVQEFYKDTYNKLKTKDEPQRETLKAIHYALNCCGLAGGVEQFISDICPKKDVLETFTVKSCPDAIKEVFDNKFHIIGAVGIGIAVVMIFGMIFSMILCCAIRRNREMVSFTKQSISLASLPKQSVLTQPPSVSVAPGQTARISCSGDNIGSYYVHWYQQKPGQAPVLVIYEDSERPSGIPERFSGSNSGNTATLTISGTQAEDEADYYCSSYDDPNFQVFGGGTKLTVLGQPKAAGGSGGSGGSGGSQVQLQQSGPGLVKPSQTLSLTCAISGDSVSSNSAAWGWIRQSPGRGLEWLGIIQKRSKWYNNYAVSVKSRITINPDTSKNQFSLQLNSVTPEDTAVYYCARYSYPFYSIDYWGQGTLVTVSSASTK

SEQ ID NO: 40 - protein, 731 aa, Artificial Sequence
  CD9-TLR3Zloop-GFP2-scFv12
MPVKGGTKCIKYLLFGFNFIFWLAGIAVLAIGLWLRFDSQTKSIFEQETNNNNSSFYTGVYILIGAGALMMLVGFLGCCGAVQESQCMLGLFFGFLLVIFAIEIAAAIWGYSHKDEVIKEVQEFYKDTYNKLKTKDEPQRETLKAIHYALNCCGLAGGVEQFISDICPKKDVLETFTVKSCPDAIKEVFDNKFHIIGAVGIGIAVVMIFGMIFSMILCCAIRRNREMVSFTKQSISLASLPKMSKGEELFTGVVPILVELDGDVNGQKFSVSGEGEGDATYGKLTLKFICTTGKLPVPWPTLVTTLSYGVQCFSRYPDHMKQHDFFKSAMPEGYVQERTIFYKDDGNYKTRAEVKFEGDTLVNRIELKGIDFKEDGNILGHKMEYNYNSHNVYIMADKPKNGIKVNFKIRHNIKDGSVQLADHYQQNTPIGDGPVLLPDNHYLSTQSALSKDPNEKRDHMILLEFVTAAGITHGMDELYKQSVLTQPPSVSVAPGQTARISCSGDNIGSYYVHWYQQKPGQAPVLVIYEDSERPSGIPERFSGSNSGNTATLTISGTQAEDEADYYCSSYDDPNFQVFGGGTKLTVLGQPKAAGGSGGSGGSGGSQVQLQQSGPGLVKPSQTLSLTCAISGDSVSSNSAAWGWIRQSPGRGLEWLGIIQKRSKWYNNYAVSVKSRITINPDTSKNQFSLQLNSVTPEDTAVYYCARYSYPFYSIDYWGQGTLVTVSSASTK

SEQ ID NO: 41 - protein, 1002 aa, Artificial Sequence
  TLR3signal-scFv12-EYFP-TLR3Zloop-CD9-GFP2
MRQTLPCIYFWGGLLPFGMLCASQSVLTQPPSVSVAPGQTARISCSGDNIGSYYVHWYQQKPGQAPVLVIYEDSERPSGIPERFSGSNSGNTATLTISGTQAEDEADYYCSSYDDPNFQVFGGGTKLTVLGQPKAAGGSGGSGGSGGSQVQLQQSGPGLVKPSQTLSLTCAISGDSVSSNSAAWGWIRQSPGRGLEWLGIIQKRSKWYNNYAVSVKSRITINPDTSKNQFSLQLNSVTPEDTAVYYCARYSYPFYSIDYWGQGTLVTVSSASTKMVSKGEELFTGVVPILVELDGDVNGHKFSVSGEGEGDATYGKLTLKFICTTGKLPVPWPTLVTTFGYGLQCFARYPDHMKQHDFFKSAMPEGYVQERTIFFKDDGNYKTRAEVKFEGDTLVNRIELKGIDFKEDGNILGHKLEYNYNSHNVYIMADKQKNGIKVNFKIRHNIEDGSVQLADHYQQNTPIGDGPVLLPDNHYLSYQSALSKDPNEKRDHMVLLEFVTAAGITLGMDELYKSGLRSTGSRSFTKQSISLASLPKMPVKGGTKCIKYLLFGFNFIFWLAGIAVLAIGLWLRFDSQTKSIFEQETNNNNSSFYTGVYILIGAGALMMLVGFLGCCGAVQESQCMLGLFFGFLLVIFAIEIAAAIWGYSHKDEVIKEVQEFYKDTYNKLKTKDEPQRETLKAIHYALNCCGLAGGVEQFISDICPKKDVLETFTVKSCPDAIKEVFDNKFHIIGAVGIGIAVVMIFGMIFSMILCCAIRRNREMVMSKGEELFTGVVPILVELDGDVNGQKFSVSGEGEGDATYGKLTLKFICTTGKLPVPWPTLVTTLSYGVQCFSRYPDHMKQHDFFKSAMPEGYVQERTIFYKDDGNYKTRAEVKFEGDTLVNRIELKGIDFKEDGNILGHKMEYNYNSHNVYIMADKPKNGIKVNFKIRHNIKDGSVQLADHYQQNTPIGDGPVLLPDNHYLSTQSALSKDPNEKRDHMILLEFVTAAGITHGMDELYK

SEQ ID NO: 42 - protein, 516 aa, Artificial Sequence
  TLR3signal-scFv12-TLR3Zloop-CD9
MRQTLPCIYFWGGLLPFGMLCASQSVLTQPPSVSVAPGQTARISCSGDNIGSYYVHWYQQKPGQAPVLVIYEDSERPSGIPERFSGSNSGNTATLTISGTQAEDEADYYCSSYDDPNFQVFGGGTKLTVLGQPKAAGGSGGSGGSGGSQVQLQQSGPGLVKPSQTLSLTCAISGDSVSSNSAAWGWIRQSPGRGLEWLGIIQKRSKWYNNYAVSVKSRITINPDTSKNQFSLQLNSVTPEDTAVYYCARYSYPFYSIDYWGQGTLVTVSSASTKSFTKQSISLASLPKMPVKGGTKCIKYLLFGFNFIFWLAGIAVLAIGLWLRFDSQTKSIFEQETNNNNSSFYTGVYILIGAGALMMLVGFLGCCGAVQESQCMLGLFFGFLLVIFAIEIAAAIWGYSHKDEVIKEVQEFYKDTYNKLKTKDEPQRETLKAIHYALNCCGLAGGVEQFISDICPKKDVLETFTVKSCPDAIKEVFDNKFHIIGAVGIGIAVVMIFGMIFSMILCCAIRRNREMV

SEQ ID NO: 43 - protein, 489 aa, Artificial Sequence
  CD9-TLR3Zloop-scFv1068
MPVKGGTKCIKYLLFGFNFIFWLAGIAVLAIGLWLRFDSQTKSIFEQETNNNNSSFYTGVYILIGAGALMMLVGFLGCCGAVQESQCMLGLFFGFLLVIFAIEIAAAIWGYSHKDEVIKEVQEFYKDTYNKLKTKDEPQRETLKAIHYALNCCGLAGGVEQFISDICPKKDVLETFTVKSCPDAIKEVFDNKFHIIGAVGIGIAVVMIFGMIFSMILCCAIRRNREMVSFTKQSISLSLPKDIQMTQSPASLSASVGETVTITCRASGNIHNYLAWYQQKQGKSPQLLVYNAKTLADGVPSRFSGSESGTQYSLKINSLQPEDFGSYYCQHFWSTPFTFGSGTKLELKRGTVAAGGSGGSGGSGGSQVQLQQPGAELVQPGTSVRLSCKASGYIFTTYWIHWVKQRPGQGLEWIGEINPNNGRINYNEKFKTKATLTVDKSSSTAYMQLSSLTSEDSAVYYCTRVGVMITTFPYWGQGTLVTVSAASTK

SEQ ID NO: 44 - protein, 728 aa, Artificial Sequence
  CD9-TLR3Zloop-GFP2-scFv1068
MPVKGGTKCIKYLLFGFNFIFWLAGIAVLAIGLWLRFDSQTKSIFEQETNNNNSSFYTGVYILIGAGALMMLVGFLGCCGAVQESQCMLGLFFGFLLVIFAIEIAAAIWGYSHKDEVIKEVQEFYKDTYNKLKTKDEPQRETLKAIHYALNCCGLAGGVEQFISDICPKKDVLETFTVKSCPDAIKEVFDNKFHIIGAVGIGIAVVMIFGMIFSMILCCAIRRNREMVSFTKQSISLASLPKMSKGEELFTGVVPILVELDGDVNGQKFSVSGEGEGDATYGKLTLKFICTTGKLPVPWPTLVTTLSYGVQCFSRYPDHMKQHDFFKSAMPEGYVQERTIFYKDDGNYKTRAEVKFEGDTLVNRIELKGIDFKEDGNILGHKMEYNYNSHNVYIMADKPKNGIKVNFKIRHNIKDGSVQLADHYQQNTPIGDGPVLLPDNHYLSTQSALSKDPNEKRDHMILLEFVTAAGITHGMDELYKDIQMTQSPASLSASVGETVTITCRASGNIHNYLAWYQQKQGKSPQLLVYNAKTLADGVPSRFSGSESGTQYSLKINSLQPEDFGSYYCQHFWSTPFTFGSGTKLELKRGTVAAGGSGGSGGSGGSQVQLQQPGAELVQPGTSVRLSCKASGYIFTTYWIHWVKQRPGQGLEWIGEINPNNGRINYNEKFKTKATLTVDKSSSTAYMQLSSLTSEDSAVYYCTRVGVMITTFPYWGQGTLVTVSAASTK

SEQ ID NO: 45 - protein, 999 aa, Artificial Sequence
  TLR3signal-scFv1068-EYFP-TLR3Zloop-CD9-GFP2
MRQTLPCIYFWGGLLPFGMLCASDIQMTQSPASLSASVGETVTITCRASGNIHNYLAWYQQKQGKSPQLLVYNAKTLADGVPSRFSGSESGTQYSLKINSLQPEDFGSYYCQHFWSTPFTFGSGTKLELKRGTVAAGGSGGSGGSGGSQVQLQQPGAELVQPGTSVRLSCKASGYIFTTYWIHWVKQRPGQGLEWIGEINPNNGRINYNEKFKTKATLTVDKSSSTAYMQLSSLTSEDSAVYYCTRVGVMITTFPYWGQGTLVTVSAASTKMVSKGEELFTGVVPILVELDGDVNGHKFSVSGEGEGDATYGKLTLKFICTTGKLPVPWPTLVTTFGYGLQCFARYPDHMKQHDFFKSAMPEGYVQERTIFFKDDGNYKTRAEVKFEGDTLVNRIELKGIDFKEDGNILGHKLEYNYNSHNVYIMADKQKNGIKVNFKIRHNIEDGSVQLADHYQQNTPIGDGPVLLPDNHYLSYQSALSKDPNEKRDHMVLLEFVTAAGITLGMDELYKSGLRSTGSRSFTKQSISLASLPKMPVKGGTKCIKYLLFGFNFIFWLAGIAVLAIGLWLRFDSQTKSIFEQETNNNNSSFYTGVYILIGAGALMMLVGFLGCCGAVQESQCMLGLFFGFLLVIFAIEIAAAIWGYSHKDEVIKEVQEFYKDTYNKLKTKDEPQRETLKAIHYALNCCGLAGGVEQFISDICPKKDVLETFTVKSCPDAIKEVFDNKFHIIGAVGIGIAVVMIFGMIFSMILCCAIRRNREMVMSKGEELFTGVVPILVELDGDVNGQKFSVSGEGEGDATYGKLTLKFICTTGKLPVPWPTLVTTLSYGVQCFSRYPDHMKQHDFFKSAMPEGYVQERTIFYKDDGNYKTRAEVKFEGDTLVNRIELKGIDFKEDGNILGHKMEYNYNSHNVYIMADKPKNGIKVNFKIRHNIKDGSVQLADHYQQNTPIGDGPVLLPDNHYLSTQSALSKDPNEKRDHMILLEFVTAAGITHGMDELYK

SEQ ID NO: 46 - protein, 513 aa, Artificial Sequence
  TLR3signal-scFv1068-TLR3Zloop-CD9
MRQTLPCIYFWGGLLPFGMLCASDIQMTQSPASLSASVGETVTITCRASGNIHNYLAWYQQKQGKSPQLLVYNAKTLADGVPSRFSGSESGTQYSLKINSLQPEDFGSYYCQHFWSTPFTFGSGTKLELKRGTVAAGGSGGSGGSGGSQVQLQQPGAELVQPGTSVRLSCKASGYIFTTYWIHWVKQRPGQGLEWIGEINPNNGRINYNEKFKTKATLTVDKSSSTAYMQLSSLTSEDSAVYYCTRVGVMITTFPYWGQGTLVTVSAASTKSFTKQSISLASLPKMPVKGGTKCIKYLLFGFNFIFWLAGIAVLAIGLWLRFDSQTKSIFEQETNNNNSSFYTGVYILIGAGALMMLVGFLGCCGAVQESQCMLGLFFGFLLVIFAIEIAAAIWGYSHKDEVIKEVQEFYKDTYNKLKTKDEPQRETLKAIHYALNCCGLAGGVEQFISDICPKKDVLETFTVKSCPDAIKEVFDNKFHIIGAVGIGIAVVMIFGMIFSMILCCAIRRNREMV

SEQ ID NO: 47 - protein, 534 aa, Artificial Sequence
  CD81-TLR7Zloop-GFP2
MGVEGCTKCIKYLLFVFNFVFWLAGGVILGVALWLRHDPQTTNLLYLELGDKPAPNTFYVGIYILIAVGAVMMFVGFLGCYGAIQESQCLLGTFFTCLVILFACEVAAGIWGFVNKDQIAKDVKQFYDQALQQAVVDDDANNAKAVVKTFHETLDCCGSSTLTALTTSVLKNNLCPSGSNIISNLFKEDCHQKIDDLFSGKLYLIGIAAIVVAVIMIFEMILSMVLCCGIRNSSVYNKISPSGDSSEVGFCSNARTSVESYEPQVLEQLHYFRYDKYARSCRFKNKEASFMSVNESMSKGEELFTGVVPILVELDGDVNGQKFSVSGEGEGDATYGKLTLKFICTTGKLPVPWPTLVTTLSYGVQCFSRYPDHMKQHDFFKSAMPEGYVQERTIFYKDDGNYKTRAEVKFEGDTLVNRIELKGIDFKEDGNILGHKMEYNYNSHNVYIMADKPKNGIKVNFKIRHNIKDGSVQLADHYQQNTPIGDGPVLLPDNHYLSTQSALSKDPNEKRDHMILLEFVTAAGITHGMDELYK

SEQ ID NO: 48 - protein, 808 aa, Artificial Sequence
  TLR7signal-EYFP-CD81-TLR7Zloop-GFP2
MVFPMWTLKRQILILFNIILISKLLGMVSKGEELFTGVVPILVELDGDVNGHKFSVSGEGEGDATYGKLTLKFICTTGKLPVPWPTLVTTFGYGLQCFARYPDHMKQHDFFKSAMPEGYVQERTIFFKDDGNYKTRAEVKFEGDTLVNRIELKGIDFKEDGNILGHKLEYNYNSHNVYIMADKQKNGIKVNFKIRHNIEDGSVQLADHYQQNTPIGDGPVLLPDNHYLSYQSALSKDPNEKRDHMVLLEFVTAAGITLGMDELYKSGLRSTGSRMGVEGCTKCIKYLLFVFNFVFWLAGGVILGVALWLRHDPQTTNLLYLELGDKPAPNTFYVGIYILIAVGAVMMFVGFLGCYGAIQESQCLLGTFFTCLVILFACEVAAGIWGFVNKDQIAKDVKQFYDQALQQAVVDDDANNAKAVVKTFHETLDCCGSSTLTALTTSVLKNNLCPSGSNIISNLFKEDCHQKIDDLFSGKLYLIGIAAIVVAVIMIFEMILSMVLCCGIRNSSVYNKISPSGDSSEVGFCSNARTSVESYEPQVLEQLHYFRYDKYARSCRFKNKEASFMSVNESMSKGEELFTGVVPILVELDGDVNGQKFSVSGEGEGDATYGKLTLKFICTTGKLPVPWPTLVTTLSYGVQCFSRYPDHMKQHDFFKSAMPEGYVQERTIFYKDDGNYKTRAEVKFEGDTLVNRIELKGIDFKEDGNILGHKMEYNYNSHNVYIMADKPKNGIKVNFKIRHNIKDGSVQLADHYQQNTPIGDGPVLLPDNHYLSTQSALSKDPNEKRDHMILLEFVTAAGITHGMDELYK

SEQ ID NO: 49 - protein, 808 aa, Artificial Sequence
  TLR7signal-EYFP-TLR7Zloop-CD81-GFP2
MVFPMWTLKRQILILFNIILISKLLGMVSKGEELFTGVVPILVELDGDVNGHKFSVSGEGEGDATYGKLTLKFICTTGKLPVPWPTLVTTFGYGLQCFARYPDHMKQHDFFKSAMPEGYVQERTIFFKDDGNYKTRAEVKFEGDTLVNRIELKGIDFKEDGNILGHKLEYNYNSHNVYIMADKQKNGIKVNFKIRHNIEDGSVQLADHYQQNTPIGDGPVLLPDNHYLSYQSALSKDPNEKRDHMVLLEFVTAAGITLGMDELYKSGLRSTGSRNKISPSGDSSEVGFCSNARTSVESYEPQVLEQLHYFRYDKYARSCRFKNKEASFMSVNESMGVEGCTKCIKYLLFVFNFVFWLAGGVILGVALWLRHDPQTTNLLYLELGDKPAPNTFYVGIYILIAVGAVMMFVGFLGCYGAIQESQCLLGTFFTCLVILFACEVAAGIWGFVNKDQIAKDVKQFYDQALQQAVVDDDANNAKAVVKTFHETLDCCGSSTLTALTTSVLKNNLCPSGSNIISNLFKEDCHQKIDDLFSGKLYLIGIAAIVVAVIMIFEMILSMVLCCGIRNSSVYMSKGEELFTGVVPILVELDGDVNGQKFSVSGEGEGDATYGKLTLKFICTTGKLPVPWPTLVTTLSYGVQCFSRYPDHMKQHDFFKSAMPEGYVQERTIFYKDDGNYKTRAEVKFEGDTLVNRIELKGIDFKEDGNILGHKMEYNYNSHNVYIMADKPKNGIKVNFKIRHNIKDGSVQLADHYQQNTPIGDGPVLLPDNHYLSTQSALSKDPNEKRDHMILLEFVTAAGITHGMDELYK

SEQ ID NO: 50 - protein, 525 aa, Artificial Sequence
  CD81-TLR8Zloop-GFP2
MGVEGCTKCIKYLLFVFNFVFWLAGGVILGVALWLRHDPQTTNLLYLELGDKPAPNTFYVGIYILIAVGAVMMFVGFLGCYGAIQESQCLLGTFFTCLVILFACEVAAGIWGFVNKDQIAKDVKQFYDQALQQAVVDDDANNAKAVVKTFHETLDCCGSSTLTALTTSVLKNNLCPSGSNIISNLFKEDCHQKIDDLFSGKLYLIGIAAIVVAVIMIFEMILSMVLCCGIRNSSVYNRISPLVKDTRQSYANSSSFQRHIRKRRSTDFEFDPHSNFYHFTRPLIKPQMSKGEELFTGVVPILVELDGDVNGQKFSVSGEGEGDATYGKLTLKFICTTGKLPVPWPTLVTTLSYGVQCFSRYPDHMKQHDFFKSAMPEGYVQERTIFYKDDGNYKTRAEVKFEGDTLVNRIELKGIDFKEDGNILGHKMEYNYNSHNVYIMADKPKNGIKVNFKIRHNIKDGSVQLADHYQQNTPIGDGPVLLPDNHYLSTQSALSKDPNEKRDHMILLEFVTAAGITHGMDELYK

SEQ ID NO: 51 - protein, 799 aa, Artificial Sequence
  TLR8signal-EYFP-CD81-TLR8Zloop-GFP2
MENMFLQSSMLTCIFLLISGSCELCAMVSKGEELFTGVVPILVELDGDVNGHKFSVSGEGEGDATYGKLTLKFICTTGKLPVPWPTLVTTFGYGLQCFARYPDHMKQHDFFKSAMPEGYVQERTIFFKDDGNYKTRAEVKFEGDTLVNRIELKGIDFKEDGNILGHKLEYNYNSHNVYIMADKQKNGIKVNFKIRHNIEDGSVQLADHYQQNTPIGDGPVLLPDNHYLSYQSALSKDPNEKRDHMVLLEFVTAAGITLGMDELYKSGLRSTGSRMGVEGCTKCIKYLLFVFNFVFWLAGGVILGVALWLRHDPQTTNLLYLELGDKPAPNTFYVGIYILIAVGAVMMFVGFLGCYGAIQESQCLLGTFFTCLVILFACEVAAGIWGFVNKDQIAKDVKQFYDQALQQAVVDDDANNAKAVVKTFHETLDCCGSSTLTALTTSVLKNNLCPSGSNIISNLFKEDCHQKIDDLFSGKLYLIGIAAIVVAVIMIFEMILSMVLCCGIRNSSVYNRISPLVKDTRQSYANSSSFQRHIRKRRSTDFEFDPHSNFYHFTRPLIKPQMSKGEELFTGVVPILVELDGDVNGQKFSVSGEGEGDATYGKLTLKFICTTGKLPVPWPTLVTTLSYGVQCFSRYPDHMKQHDFFKSAMPEGYVQERTIFYKDDGNYKTRAEVKFEGDTLVNRIELKGIDFKEDGNILGHKMEYNYNSHNVYIMADKPKNGIKVNFKIRHNIKDGSVQLADHYQQNTPIGDGPVLLPDNHYLSTQSALSKDPNEKRDHMILLEFVTAAGITHGMDELYK

SEQ ID NO: 52 - protein, 799 aa, Artificial Sequence
  TLR8signal-EYFP-TLR8Zloop-CD81-GFP2
MENMFLQSSMLTCIFLLISGSCELCAMVSKGEELFTGVVPILVELDGDVNGHKFSVSGEGEGDATYGKLTLKFICTTGKLPVPWPTLVTTFGYGLQCFARYPDHMKQHDFFKSAMPEGYVQERTIFFKDDGNYKTRAEVKFEGDTLVNRIELKGIDFKEDGNILGHKLEYNYNSHNVYIMADKQKNGIKVNFKIRHNIEDGSVQLADHYQQNTPIGDGPVLLPDNHYLSYQSALSKDPNEKRDHMVLLEFVTAAGITLGMDELYKSGLRSTGSRNRISPLVKDTRQSYANSSSFQRHIRKRRSTDFEFDPHSNFYHFTRPLIKPQMGVEGCTKCIKYLLFVFNFVFWLAGGVILGVALWLRHDPQTTNLLYLELGDKPAPNTFYVGIYILIAVGAVMMFVGFLGCYGAIQESQCLLGTFFTCLVILFACEVAAGIWGFVNKDQIAKDVKQFYDQALQQAVVDDDANNAKAVVKTFHETLDCCGSSTLTALTTSVLKNNLCPSGSNIISNLFKEDCHQKIDDLFSGKLYLIGIAAIVVAVIMIFEMILSMVLCCGIRNSSVYMSKGEELFTGVVPILVELDGDVNGQKFSVSGEGEGDATYGKLTLKFICTTGKLPVPWPTLVTTLSYGVQCFSRYPDHMKQHDFFKSAMPEGYVQERTIFYKDDGNYKTRAEVKFEGDTLVNRIELKGIDFKEDGNILGHKMEYNYNSHNVYIMADKPKNGIKVNFKIRHNIKDGSVQLADHYQQNTPIGDGPVLLPDNHYLSTQSALSKDPNEKRDHMILLEFVTAAGITHGMDELYK

SEQ ID NO: 53 - protein, 519 aa, Artificial Sequence
  CD81-TLR9Zloop-GFP2
MGVEGCTKCIKYLLFVFNFVFWLAGGVILGVALWLRHDPQTTNLLYLELGDKPAPNTFYVGIYILIAVGAVMMFVGFLGCYGAIQESQCLLGTFFTCLVILFACEVAAGIWGFVNKDQIAKDVKQFYDQALQQAVVDDDANNAKAVVKTFHETLDCCGSSTLTALTTSVLKNNLCPSGSNIISNLFKEDCHQKIDDLFSGKLYLIGIAAIVVAVIMIFEMILSMVLCCGIRNSSVYNRISGASELTATMGEADGGEKVWLQPGDLAPAPVDTPSSEDFRPNMSKGEELFTGVVPILVELDGDVNGQKFSVSGEGEGDATYGKLTLKFICTTGKLPVPWPTLVTTLSYGVQCFSRYPDHMKQHDFFKSAMPEGYVQERTIFYKDDGNYKTRAEVKFEGDTLVNRIELKGIDFKEDGNILGHKMEYNYNSHNVYIMADKPKNGIKVNFKIRHNIKDGSVQLADHYQQNTPIGDGPVLLPDNHYLSTQSALSKDPNEKRDHMILLEFVTAAGITHGMDELYK

SEQ ID NO: 54 - protein, 792 aa, Artificial Sequence
  TLR9signal-EYFP-CD81-TLR9Zloop-GFP2
MGFCRSALHPLSLLVQAIMLAMTLAMVSKGEELFTGVVPILVELDGDVNGHKFSVSGEGEGDATYGKLTLKFICTTGKLPVPWPTLVTTFGYGLQCFARYPDHMKQHDFFKSAMPEGYVQERTIFFKDDGNYKTRAEVKFEGDTLVNRIELKGIDFKEDGNILGHKLEYNYNSHNVYIMADKQKNGIKVNFKIRHNIEDGSVQLADHYQQNTPIGDGPVLLPDNHYLSYQSALSKDPNEKRDHMVLLEFVTAAGITLGMDELYKSGLRSTGSRMGVEGCTKCIKYLLFVFNFVFWLAGGVILGVALWLRHDPQTTNLLYLELGDKPAPNTFYVGIYILIAVGAVMMFVGFLGCYGAIQESQCLLGTFFTCLVILFACEVAAGIWGFVNKDQIAKDVKQFYDQALQQAVVDDDANNAKAVVKTFHETLDCCGSSTLTALTTSVLKNNLCPSGSNIISNLFKEDCHQKIDDLFSGKLYLIGIAAIVVAVIMIFEMILSMVLCCGIRNSSVYNRISGASELTATMGEADGGEKVWLQPGDLAPAPVDTPSSEDFRPNMSKGEELFTGVVPILVELDGDVNGQKFSVSGEGEGDATYGKLTLKFICTTGKLPVPWPTLVTTLSYGVQCFSRYPDHMKQHDFFKSAMPEGYVQERTIFYKDDGNYKTRAEVKFEGDTLVNRIELKGIDFKEDGNILGHKMEYNYNSHNVYIMADKPKNGIKVNFKIRHNIKDGSVQLADHYQQNTPIGDGPVLLPDNHYLSTQSALSKDPNEKRDHMILLEFVTAAGITHGMDELYK

SEQ ID NO: 55 - protein, 792 aa, Artificial Sequence
  TLR9signal-EYFP-TLR9Zloop-CD81-GFP2
MGFCRSALHPLSLLVQAIMLAMTLAMVSKGEELFTGVVPILVELDGDVNGHKFSVSGEGEGDATYGKLTLKFICTTGKLPVPWPTLVTTFGYGLQCFARYPDHMKQHDFFKSAMPEGYVQERTIFFKDDGNYKTRAEVKFEGDTLVNRIELKGIDFKEDGNILGHKLEYNYNSHNVYIMADKQKNGIKVNFKIRHNIEDGSVQLADHYQQNTPIGDGPVLLPDNHYLSYQSALSKDPNEKRDHMVLLEFVTAAGITLGMDELYKSGLRSTGSRNRISGASELTATMGEADGGEKVWLQPGDLAPAPVDTPSSEDFRPNMGVEGCTKCIKYLLFVFNFVFWLAGGVILGVALWLRHDPQTTNLLYLELGDKPAPNTFYVGIYILIAVGAVMMFVGFLGCYGAIQESQCLLGTFFTCLVILFACEVAAGIWGFVNKDQIAKDVKQFYDQALQQAVVDDDANNAKAVVKTFHETLDCCGSSTLTALTTSVLKNNLCPSGSNIISNLFKEDCHQKIDDLFSGKLYLIGIAAIVVAVIMIFEMILSMVLCCGIRNSSVYMSKGEELFTGVVPILVELDGDVNGQKFSVSGEGEGDATYGKLTLKFICTTGKLPVPWPTLVTTLSYGVQCFSRYPDHMKQHDFFKSAMPEGYVQERTIFYKDDGNYKTRAEVKFEGDTLVNRIELKGIDFKEDGNILGHKMEYNYNSHNVYIMADKPKNGIKVNFKIRHNIKDGSVQLADHYQQNTPIGDGPVLLPDNHYLSTQSALSKDPNEKRDHMILLEFVTAAGITHGMDELYK

SEQ ID NO: 56 - protein, 488 aa, Artificial Sequence
  CD81-TLR3Zloop-GFP2
MGVEGCTKCIKYLLFVFNFVFWLAGGVILGVALWLRHDPQTTNLLYLELGDKPAPNTFYVGIYILIAVGAVMMFVGFLGCYGAIQESQCLLGTFFTCLVILFACEVAAGIWGFVNKDQIAKDVKQFYDQALQQAVVDDDANNAKAVVKTFHETLDCCGSSTLTALTTSVLKNNLCPSGSNIISNLFKEDCHQKIDDLFSGKLYLIGIAAIVVAVIMIFEMILSMVLCCGIRNSSVYSFTKQSISLASLPKMSKGEELFTGVVPILVELDGDVNGQKFSVSGEGEGDATYGKLTLKFICTTGKLPVPWPTLVTTLSYGVQCFSRYPDHMKQHDFFKSAMPEGYVQERTIFYKDDGNYKTRAEVKFEGDTLVNRIELKGIDFKEDGNILGHKMEYNYNSHNVYIMADKPKNGIKVNFKIRHNIKDGSVQLADHYQQNTPIGDGPVLLPDNHYLSTQSALSKDPNEKRDHMILLEFVTAAGITHGMDELYK

SEQ ID NO: 57 - protein, 758 aa, Artificial Sequence
  TLR3signal-EYFP-TLR3Zloop-CD81-GFP2
MRQTLPCIYFWGGLLPFGMLCASMVSKGEELFTGVVPILVELDGDVNGHKFSVSGEGEGDATYGKLTLKFICTTGKLPVPWPTLVTTFGYGLQCFARYPDHMKQHDFFKSAMPEGYVQERTIFFKDDGNYKTRAEVKFEGDTLVNRIELKGIDFKEDGNILGHKLEYNYNSHNVYIMADKQKNGIKVNFKIRHNIEDGSVQLADHYQQNTPIGDGPVLLPDNHYLSYQSALSKDPNEKRDHMVLLEFVTAAGITLGMDELYKSGLRSTGSRSFTKQSISLASLPKMGVEGCTKCIKYLLFVFNFVFWLAGGVILGVALWLRHDPQTTLLYLELGDKPAPNTFYVGIYILIAVGAVMMFVGFLGCYGAIQESQCLLGTFFTCLVILFACEVAAGIWGFVNKDQIAKDVKQFYDQALQQAVVDDDANNAKAVVKTFHETLDCCGSSTLTALTTSVLKNNLCPSGSNIISNLFKEDCHQKIDDLFSGKLYLIGIAAIVVAVIMIFEMILSMVLCCGIRNSSVYMSKGEELFTGVVPILVELDGDVNGQKFSVSGEGEGDATYGKLTLKFICTTGKLPVPWPTLVTTLSYGVQCFSRYPDHMKQHDFFKSAMPEGYVQERTIFYKDDGNYKTRAEVKFEGDTLVNRIELKGIDFKEDGNILGHKMEYNYNSHNVYIMADKPKNGIKVNFKIRHNIKDGSVQLADHYQQNTPIGDGPVLLPDNHYLSTQSALSKDPNEKRDHMILLEFVTAAGITHGMDELYK

SEQ ID NO: 58 - protein, 498 aa, Artificial Sequence
  CD81-TLR3Zloop-scFv15
MGVEGCTKCIKYLLFVFNFVFWLAGGVILGVALWLRHDPQTTNLLYLELGDKPAPNTFYVGIYILIAVGAVMMFVGFLGCYGAIQESQCLLGTFFTCLVILFACEVAAGIWGFVNKDQIAKDVKQFYDQALQQAVVDDDANNAKAVVKTFHETLDCCGSSTLTALTTSVLKNNLCPSGSNIISNLFKEDCHQKIDDLFSGKLYLIGIAAIVVAVIMIFEMILSMVLCCGIRNSSVYSFTKQSISLASLPKDIQMTQSPSSLSASVGDRVTITCRASQSIGLYLAWYQQKPGKAPKLLIYAASSLQSGVPSRFSGSGSGTDFTLTISSLQPEDFATYYCQQGNTLSYTFGQGTKVEIKRTVAGGSGGSGGSGGSEVQLVQSGAEVKKPGESLKISCKGSGYSFTNYWVGWVRQMPGKGLEWMGFIDPSDSYTNYAPSFQGQVTISADKSISTAYLQWSSLKASDTAMYYCARELYQGYMDTFDSWGQGTLVTVSSASTK

SEQ ID NO: 59 - protein, 736 aa, Artificial Sequence
  CD81-TLR3Zloop-GFP2-scFv15
MGVEGCTKCIKYLLFVFNFVFWLAGGVILGVALWLRHDPQTTNLLYLELGDKPAPNTFYVGIYILIAVGAVMMFVGFLGCYGAIQESQCLLGTFFTCLVILFACEVAAGIWGFVNKDQIAKDVKQFYDQALQQAVVDDDANNAKAVVKTFHETLDCCGSSTLTALTTSVLKNNLCPSGSNIISNLFKEDCHQKIDDLFSGKLYLIGIAAIVVAVIMIFEMILSMVLCCGIRNSSVYSFTKQSISLASLPKMSKGEELFTGVVPILVELDGDVNGQKFSVSGEGEGDATYGKLTLKFICTTGKLPVPWPTLVTTLSYGVQCFSRYPDHMKQHDFFKSAMPEGYVQERTIFYKDDGNYKTRAEVKFEGDTLVNRIELKGIDFKEDGNILGHKMEYNYNSHNVYIMADKPKNGIKVNFKIRHNIKDGSVQLADHYQQNTPIGDGPVLLPDNHYLSTQSALSKDPNEKRDHMILLEFVTAAGITHGMDELYKDIQMTQSPSSLSASVGDRVTITCRASQSIGLYLAWYQQKPGKAPKLLIYAASSLQSGVPSRFSGSGSGTDFTLTISSLQPEDFATYYCQQGNTLSYTFGQGTKVEIKRTVAGGSGGSGGSGGSEVQLVQSGAEVKKPGESLKISCKGSGYSFTNYWVGWVRQMPGKGLEWMGFIDPSDSYTNYAPSFQGQVTISADKSISTAYLQWSSLKASDTAMYYCARELYQGYMDTFDSWGQGTLVTVSSASTK

SEQ ID NO: 60 - protein, 1007 aa, Artificial Sequence
  TLR3signal-scFv15-EYFP-TLR3Zloop-CD81-GFP2
MRQTLPCIYFWGGLLPFGMLCASDIQMTQSPSSLSASVGDRVTITCRASQSIGLYLAWYQQKPGKAPKLLIYAASSLQSGVPSRFSGSGSGTDFTLTISSLQPEDFATYYCQQGNTLSYTFGQGTKVEIKRTVAGGSGGSGGSGGSEVQLVQSGAEVKKPGESLKISCKGSGYSFTNYWVGWVRQMPGKGLEWMGFIDPSDSYTNYAPSFQGQVTISADKSISTAYLQWSSLKASDTAMYYCARELYQGYMDTFDSWGQGTLVTVSSASTKMVSKGEELFTGVVPILVELDGDVNGHKFSVSGEGEGDATYGKLTLKFICTTGKLPVPWPTLVTTFGYGLQCFARYPDHMKQHDFFKSAMPEGYVQERTIFFKDDGNYKTRAEVKFEGDTLVNRIELKGIDFKEDGNILGHKLEYNYNSHNVYIMADKQKNGIKVNFKIRHNIEDGSVQLADHYQQNTPIGDGPVLLPDNHYLSYQSALSKDPNEKRDHMVLLEFVTAAGITLGMDELYKSGLRSTGSRSFTKQSISLASLPKMGVEGCTKCIKYLLFVFNFVFWLAGGVILGVALWLRHDPQTTNLLYLELGDKPAPNTFYVGIYILIAVGAVMMFVGFLGCYGAIQESQCLLGTFFTCLVILFACEVAAGIWGFVNKDQIAKDVKQFYDQALQQAVVDDDANNAKAVVKTFHETLDCCGSSTLTALTTSVLKNNLCPSGSNIISNLFKEDCHQKIDDLFSGKLYLIGIAAIVVAVIMIFEMILSMVLCCGIRNSSVYMSKGEELFTGVVPILVELDGDVNGQKFSVSGEGEGDATYGKLTLKFICTTGKLPVPWPTLVTTLSYGVQCFSRYPDHMKQHDFFKSAMPEGYVQERTIFYKDDGNYKTRAEVKFEGDTLVNRIELKGIDFKEDGNILGHKMEYNYNSHNVYIMADKPKNGIKVNFKIRHNIKDGSVQLADHYQQNTPIGDGPVLLPDNHYLSTQSALSKDPNEKRDHMILLEFVTAAGITHGMDELYK

SEQ ID NO: 61 - protein, 521 aa, Artificial Sequence
  TLR3signal-scFv15-TLR3Zloop-CD81
MRQTLPCIYFWGGLLPFGMLCASDIQMTQSPSSLSASVGDRVTITCRASQSIGLYLAWYQQKPGKAPKLLIYAASSLQSGVPSRFSGSGSGTDFTLTISSLQPEDFATYYCQQGNTLSYTFGQGTKVEIKRTVAGGSGGSGGSGGSEVQLVQSGAEVKKPGESLKISCKGSGYSFTNYWVGWVRQMPGKGLEWMGFIDPSDSYTNYAPSFQGQVTISADKSISTAYLQWSSLKASDTAMYYCARELYQGYMDTFDSWGQGTLVTVSSASTKSFTKQSISLASLPKMGVEGCTKCIKYLLFVFNFVFWLAGGVILGVALWLRHDPQTTNLLYLELGDKPAPNTFYVGIYILIAVGAVMMFVGFLGCYGAIQESQCLLGTFFTCLVILFACEVAAGIWGFVNKDQIAKDVKQFYDQALQQAVVDDDANNAKAVVKTFHETLDCCGSSTLTALTTSVLKNNLCPSGSNIISNLFKEDCHQKIDDLFSGKLYLIGIAAIVVAVIMIFEMILSMVLCCGIRNSSVY

SEQ ID NO: 62 - protein, 501 aa, Artificial Sequence
  CD81-TLR3Zloop-scFv12
MGVEGCTKCIKYLLFVFNFVFWLAGGVILGVALWLRHDPQTTNLLYLELGDKPAPNTFYVGIYILIAVGAVMMFVGFLGCYGAIQESQCLLGTFFTCLVILFACEVAAGIWGFVNKDQIAKDVKQFYDQALQQAVVDDDANNAKAVVKTFHETLDCCGSSTLTALTTSVLKNNLCPSGSNIISNLFKEDCHQKIDDLFSGKLYLIGIAAIVVAVIMIFEMILSMVLCCGIRNSSVYSFTKQSISLASLPKQSVLTQPPSVSVAPGQTARISCSGDNIGSYYVHWYQQKPGQAPVLVIYEDSERPSGIPERFSGSNSGNTATLTISGTQAEDEADYYCSSYDDPNFQVFGGGTKLTVLGQPKAAGGSGGSGGSGGSQVQLQQSGPGLVKPSQTLSLTCAISGDSVSSNSAAWGWIRQSPGRGLEWLGIIQKRSKWYNNYAVSVKSRITINPDTSKNQFSLQLNSVTPEDTAVYYCARYSYPFYSIDYWGQGTLVTVSSASTK

SEQ ID NO: 63 - protein, 739 aa, Artificial Sequence
  CD81-TLR3Zloop-GFP2-scFv12
MGVEGCTKCIKYLLFVFNFVFWLAGGVILGVALWLRHDPQTTNLLYLELGDKPAPNTFYVGIYILIAVGAVMMFVGFLGCYGAIQESQCLLGTFFTCLVILFACEVAAGIWGFVNKDQIAKDVKQFYDQALQQAVVDDDANNAKAVVKTFHETLDCCGSSTLTALTTSVLKNNLCPSGSNIISNLFKEDCHQKIDDLFSGKLYLIGIAAIVVAVIMIFEMILSMVLCCGIRNSSVYSFTKQSISLASLPKMSKGEELFTGVVPILVELDGDVNGQKFSVSGEGEGDATYGKLTLKFICTTGKLPVPWPTLVTTLSYGVQCFSRYPDHMKQHDFFKSAMPEGYVQERTIFYKDDGNYKTRAEVKFEGDTLVNRIELKGIDFKEDGNILGHKMEYNYNSHNVYIMADKPKNGIKVNFKIRHNIKDGSVQLADHYQQNTPIGDGPVLLPDNHYLSTQSALSKDPNEKRDHMILLEFVTAAGITHGMDELYKQSVLTQPPSVSVAPGQTARISCSGDNIGSYYVHWYQQKPGQAPVLVIYEDSERPSGIPERFSGSNSGNTATLTISGTQAEDEADYYCSSYDDPNFQVFGGGTKLTVLGQPKAAGGSGGSGGSGGSQVQLQQSGPGLVKPSQTLSLTCAISGDSVSSNSAAWGWIRQSPGRGLEWLGIIQKRSKWYNNYAVSVKSRITINPDTSKNQFSLQLNSVTPEDTAVYYCARYSYPFYSIDYWGQGTLVTVSSASTK

SEQ ID NO: 64 - protein, 1010 aa, Artificial Sequence
  TLR3signal-scFv12-EYFP-TLR3Zloop-CD81-GFP2
MRQTLPCIYFWGGLLPFGMLCASQSVLTQPPSVSVAPGQTARISCSGDNIGSYYVHWYQQKPGQAPVLVIYEDSERPSGIPERFSGSNSGNTATLTISGTQAEDEADYYCSSYDDPNFQVFGGGTKLTVLGQPKAAGGSGGSGGSGGSQVQLQQSGPGLVKPSQTLSLTCAISGDSVSSNSAAWGWIRQSPGRGLEWLGIIQKRSKWYNNYAVSVKSRITINPDTSKNQFSLQLNSVTPEDTAVYYCARYSYPFYSIDYWGQGTLVTVSSASTKMVSKGEELFTGVVPILVELDGDVNGHKFSVSGEGEGDATYGKLTLKFICTTGKLPVPWPTLVTTFGYGLQCFARYPDHMKQHDFFKSAMPEGYVQERTIFFKDDGNYKTRAEVKFEGDTLVNRIELKGIDFKEDGNILGHKLEYNYNSHNVYIMADKQKNGIKVNFKIRHNIEDGSVQLADHYQQNTPIGDGPVLLPDNHYLSYQSALSKDPNEKRDHMVLLEFVTAAGITLGMDELYKSGLRSTGSRSFTKQSISLASLPKMGVEGCTKCIKYLLFVFNFVFWLAGGVILGVALWLRHDPQTTNLLYLELGDKPAPNTFYVGIYILIAVGAVMMFVGFLGCYGAIQESQCLLGTFFTCLVILFACEVAAGIWGFVNKDQIAKDVKQFYDQALQQAVVDDDANNAKAVVKTFHETLDCCGSSTLTALTTSVLKNNLCPSGSNIISNLFKEDCHQKIDDLFSGKLYLIGIAAIVVAVIMIFEMILSMVLCCGIRNSSVYMSKGEELFTGVVPILVELDGDVNGQKFSVSGEGEGDATYGKLTLKFICTTGKLPVPWPTLVTTLSYGVQCFSRYPDHMKQHDFFKSAMPEGYVQERTIFYKDDGNYKTRAEVKFEGDTLVNRIELKGIDFKEDGNILGHKMEYNYNSHNVYIMADKPKNGIKVNFKIRHNIKDGSVQLADHYQQNTPIGDGPVLLPDNHYLSTQSALSKDPNEKRDHMILLEFVTAAGITHGMDELYK

SEQ ID NO: 65 - protein, 524 aa, Artificial Sequence
  TLR3signal-scFv12-TLR3Zloop-CD81
MRQTLPCIYFWGGLLPFGMLCASQSVLTQPPSVSVAPGQTARISCSGDNIGSYYVHWYQQKPGQAPVLVIYEDSERPSGIPERFSGSNSGNTATLTISGTQAEDEADYYCSSYDDPNFQVFGGGTKLTVLGQPKAAGGSGGSGGSGGSQVQLQQSGPGLVKPSQTLSLTCAISGDSVSSNSAAWGWIRQSPGRGLEWLGIIQKRSKWYNNYAVSVKSRITINPDTSKNQFSLQLNSVTPEDTAVYYCARYSYPFYSIDYWGQGTLVTVSSASTKSFTKQSISLASLPKMGVEGCTKCIKYLLFVFNFVFWLAGGVILGVALWLRHDPQTTNLLYLELGDKPAPNTFYVGIYILIAVGAVMMFVGFLGCYGAIQESQCLLGTFFTCLVILFACEVAAGIWGFVNKDQIAKDVKQFYDQALQQAVVDDDANNAKAVVKTFHETLDCCGSSTLTALTTSVLKNNLCPSGSNIISNLFKEDCHQKIDDLFSGKLYLIGIAAIVVAVIMIFEMILSMVLCCGIRNSSVY

SEQ ID NO: 66 - protein, 498 aa, Artificial Sequence
  CD81-TLR3Zloop-scFv1068
MGVEGCTKCIKYLLFVFNFVFWLAGGVILGVALWLRHDPQTTNLLYLELGDKPAPNTFYVGIYILIAVGAVMMFVGFLGCYGAIQESQCLLGTFFTCLVILFACEVAAGIWGFVNKDQIAKDVKQFYDQALQQAVVDDDANNAKAVVKTFHETLDCCGSSTLTALTTSVLKNNLCPSGSNIISNLFKEDCHQKIDDLFSGKLYLIGIAAIVVAVIMIFEMILSMVLCCGIRNSSVYSFTKQSISLASLPKDIQMTQSPASLSASVGETVTITCRASGNIHNYLAWYQQKQGKSPQLLVYNAKTLADGVPSRFSGSESGTQYSLKINSLQPEDFGSYYCQHFWSTPFTFGSGTKLELKRGTVAAGGSGGSGGSGGSQVQLQQPGAELVQPGTSVRLSCKASGYIFTTYWIHWVKQRPGQGLEWIGEINPNNGRINYNEKFKTKATLTVDKSSSTAYMQLSSLTSEDSAVYYCTRVGVMITTFPYWGQGTLVTVSAASTK

SEQ ID NO: 67 - protein, 736 aa, Artificial Sequence
  CD81-TLR3Zloop-GFP2-scFv1068
MGVEGCTKCIKYLLFVFNFVFWLAGGVILGVALWLRHDPQTTNLLYLELGDKPAPNTFYVGIYILIAVGAVMMFVGFLGCYGAIQESQCLLGTFFTCLVILFACEVAAGIWGFVNKDQIAKDVKQFYDQALQQAVVDDDANNAKAVVKTFHETLDCCGSSTLTALTTSVLKNNLCPSGSNIISNLFKEDCHQKIDDLFSGKLYLIGIAAIVVAVIMIFEMILSMVLCCGIRNSSVYSFTKQSISLASLPKMSKGEELFTGVVPILVELDGDVNGQKFSVSGEGEGDATYGKLTLKFICTTGKLPVPWPTLVTTLSYGVQCFSRYPDHMKQHDFFKSAMPEGYVQERTIFYKDDGNYKTRAEVKFEGDTLVNRIELKGIDFKEDGNILGHKMEYNYNSHNVYIMADKPKNGIKVNFKIRHNIKDGSVQLADHYQQNTPIGDGPVLLPDNHYLSTQSALSKDPNEKRDHMILLEFVTAAGITHGMDELYKDIQMTQSPASLSASVGETVTITCRASGNIHNYLAWYQQKQGKSPQLLVYNAKTLADGVPSRFSGSESGTQYSLKINSLQPEDFGSYYCQHFWSTPFTFGSGTKLELKRGTVAAGGSGGSGGSGGSQVQLQQPGAELVQPGTSVRLSCKASGYIFTTYWIHWVKQRPGQGLEWIGEINPNNGRINYNEKFKTKATLTVDKSSSTAYMQLSSLTSEDSAVYYCTRVGVMITTFPYWGQGTLVTVSAASTK

SEQ ID NO: 68 - protein, 1007 aa, Artificial Sequence
  TLR3signal-scFv1068-EYFP-TLR3Zloop-CD81-GFP2
MRQTLPCIYFWGGLLPFGMLCASDIQMTQSPASLSASVGETVTITCRASGNIHNYLAWYQQKQGKSPQLLVYNAKTLADGVPSRFSGSESGTQYSLKINSLQPEDFGSYYCQHFWSTPFTFGSGTKLELKRGTVAAGGSGGSGGSGGSQVQLQQPGAELVQPGTSVRLSCKASGYIFTTYWIHWVKQRPGQGLEWIGEINPNNGRINYNEKFKTKATLTVDKSSSTAYMQLSSLTSEDSAVYYCTRVGVMITTFPYWGQGTLVTVSAASTKMVSKGEELFTGVVPILVELDGDVNGHKFSVSGEGEGDATYGKLTLKFICTTGKLPVPWPTLVTTFGYGLQCFARYPDHMKQHDFFKSAMPEGYVQERTIFFKDDGNYKTRAEVKFEGDTLVNRIELKGIDFKEDGNILGHKLEYNYNSHNVYIMADKQKNGIKVNFKIRHNIEDGSVQLADHYQQNTPIGDGPVLLPDNHYLSYQSALSKDPNEKRDHMVLLEFVTAAGITLGMDELYKSGLRSTGSRSFTKQSISLASLPKMGVEGCTKCIKYLLFVFNFVFWLAGGVILGVALWLRHDPQTTNLLYLELGDKPAPNTFYVGIYILIAVGAVMMFVGFLGCYGAIQESQCLLGTFFTCLVILFACEVAAGIWGFVNKDQIAKDVKQFYDQALQQAVVDDDANNAKAVVKTFHETLDCCGSSTLTALTTSVLKNNLCPSGSNIISNLFKEDCHQKIDDLFSGKLYLIGIAAIVVAVIMIFEMILSMVLCCGIRNSSVYMSKGEELFTGVVPILVELDGDVNGQKFSVSGEGEGDATYGKLTLKFICTTGKLPVPWPTLVTTLSYGVQCFSRYPDHMKQHDFFKSAMPEGYVQERTIFYKDDGNYKTRAEVKFEGDTLVNRIELKGIDFKEDGNILGHKMEYNYNSHNVYIMADKPKNGIKVNFKIRHNIKDGSVQLADHYQQNTPIGDGPVLLPDNHYLSTQSALSKDPNEKRDHMILLEFVTAAGITHGMDELYK

SEQ ID NO: 69 - protein, 521 aa, Artificial Sequence
  TLR3signal-scFv1068-TLR3Zloop-CD81
MRQTLPCIYFWGGLLPFGMLCASDIQMTQSPASLSASVGETVTITCRASGNIHNYLAWYQQKQGKSPQLLVYNAKTLADGVPSRFSGSESGTQYSLKINSLQPEDFGSYYCQHFWSTPFTFGSGTKLELKRGTVAAGGSGGSGGSGGSQVQLQQPGAELVQPGTSVRLSCKASGYIFTTYWIHWVKQRPGQGLEWIGEINPNNGRINYNEKFKTKATLTVDKSSSTAYMQLSSLTSEDSAVYYCTRVGVMITTFPYWGQGTLVTVSAASTKSFTKQSISLASLPKMGVEGCTKCIKYLLFVFNFVFWLAGGVILGVALWLRHDPQTTNLLYLELGDKPAPNTFYVGIYILIAVGAVMMFVGFLGCYGAIQESQCLLGTFFTCLVILFACEVAAGIWGFVNKDQIAKDVKQFYDQALQQAVVDDDANNAKAVVKTFHETLDCCGSSTLTALTTSVLKNNLCPSGSNIISNLFKEDCHQKIDDLFSGKLYLIGIAAIVVAVIMIFEMILSMVLCCGIRNSSVY

SEQ ID NO: 70 - protein, 565 aa, Artificial Sequence
  CD82-TLR7Zloop-GFP2
MGSACIKVTKYFLFLFNLIFFILGAVILGFGVWILADKSSFISVLQTSSSSLRMGAYVFIGVGAVTMLMGFLGCIGAVNEVRCLLGLYFAFLLLILIAQVTAGALFYFNMGKLKQEMGGIVTELIRDYNSSREDSLQDAWDYVQAQVKCCGWVSFYNWTDNAELMNRPEVTYPCSCEVKGEEDNSLSVRKGFCEAPGNRTQSGNHPEDWPVYQEGCMEKVQAWLQENLGIILGVGVGVAIIELLGMVLSICLCRHVHSEDYSKVPKYNKISPSGDSSEVGFCSNARTSVESYEPQVLEQLHYFRYDKYARSCRFKNKEASFMSVNESMSKGEELFTGVVPILVELDGDVNGQKFSVSGEGEGDATYGKLTLKFICTTGKLPVPWPTLVTTLSYGVQCFSRYPDHMKQHDFFKSAMPEGYVQERTIFYKDDGNYKTRAEVKFEGDTLVNRIELKGIDFKEDGNILGHKMEYNYNSHNVYIMADKPKNGIKVNFKIRHNIKDGSVQLADHYQQNTPIGDGPVLLPDNHYLSTQSALSKDPNEKRDHMILLEFVTAAGITHGMDELYK

SEQ ID NO: 71 - protein, 839 aa, Artificial Sequence
  TLR7signal-EYFP-CD82-TLR7Zloop-GFP2
MVFPMWTLKRQILILFNIILISKLLGMVSKGEELFTGVVPILVELDGDVNGHKFSVSGEGEGDATYGKLTLKFICTTGKLPVPWPTLVTTFGYGLQCFARYPDHMKQHDFFKSAMPEGYVQERTIFFKDDGNYKTRAEVKFEGDTLVNRIELKGIDFKEDGNILGHKLEYNYNSHNVYIMADKQKNGIKVNFKIRHNIEDGSVQLADHYQQNTPIGDGPVLLPDNHYLSYQSALSKDPNEKRDHMVLLEFVTAAGITLGMDELYKSGLRSTGSRMGSACIKVTKYFLFLFNLIFFILGAVILGFGVWILADKSSFISVLQTSSSSLRMGAYVFIGVGAVTMLMGFLGCIGAVNEVRCLLGLYFAFLLLILIAQVTAGALFYFNMGKLKQEMGGIVTELIRDYNSSREDSLQDAWDYVQAQVKCCGWVSFYNWTDNAELMNRPEVTYPCSCEVKGEEDNSLSVRKGFCEAPGNRTQSGNHPEDWPVYQEGCMEKVQAWLQENLGIILGVGVGVAIIELLGMVLSICLCRHVHSEDYSKVPKYNKISPSGDSSEVGFCSNARTSVESYEPQVLEQLHYFRYDKYARSCRFKNKEASFMSVNESMSKGEELFTGVVPILVELDGDVNGQKFSVSGEGEGDATYGKLTLKFICTTGKLPVPWPTLVTTLSYGVQCFSRYPDHMKQHDFFKSAMPEGYVQERTIFYKDDGNYKTRAEVKFEGDTLVNRIELKGIDFKEDGNILGHKMEYNYNSHNVYIMADKPKNGIKVNFKIRHNIKDGSVQLADHYQQNTPIGDGPVLLPDNHYLSTQSALSKDPNEKRDHMILLEFVTAAGITHGMDELYK

SEQ ID NO: 72 - protein, 839 aa, Artificial Sequence
  TLR7signal-EYFP-TLR7Zloop-CD82-GFP2
MVFPMWTLKRQILILFNIILISKLLGMVSKGEELFTGVVPILVELDGDVNGHKFSVSGEGEGDATYGKLTLKFICTTGKLPVPWPTLVTTFGYGLQCFARYPDHMKQHDFFKSAMPEGYVQERTIFFKDDGNYKTRAEVKFEGDTLVNRIELKGIDFKEDGNILGHKLEYNYNSHNVYIMADKQKNGIKVNFKIRHNIEDGSVQLADHYQQNTPIGDGPVLLPDNHYLSYQSALSKDPNEKRDHMVLLEFVTAAGITLGMDELYKSGLRSTGSRNKISPSGDSSEVGFCSNARTSVESYEPQVLEQLHYFRYDKYARSCRFKNKEASFMSVNESMGSACIKVTKYFLFLFNLIFFILGAVILGFGVWILADKSSFISVLQTSSSSLRMGAYVFIGVGAVTMLMGFLGCIGAVNEVRCLLGLYFAFLLLILIAQVTAGALFYFNMGKLKQEMGGIVTELIRDYNSSREDSLQDAWDYVQAQVKCCGWVSFYNWTDNAELMNRPEVTYPCSCEVKGEEDNSLSVRKGFCEAPGNRTQSGNHPEDWPVYQEGCMEKVQAWLQENLGIILGVGVGVAIIELLGMVLSICLCRHVHSEDYSKVPKYMSKGEELFTGVVPILVELDGDVNGQKFSVSGEGEGDATYGKLTLKFICTTGKLPVPWPTLVTTLSYGVQCFSRYPDHMKQHDFFKSAMPEGYVQERTIFYKDDGNYKTRAEVKFEGDTLVNRIELKGIDFKEDGNILGHKMEYNYNSHNVYIMADKPKNGIKVNFKIRHNIKDGSVQLADHYQQNTPIGDGPVLLPDNHYLSTQSALSKDPNEKRDHMILLEFVTAAGITHGMDELYK

SEQ ID NO: 73 - protein, 556 aa, Artificial Sequence
  CD82-TLR8Zloop-GFP2
MGSACIKVTKYFLFLFNLIFFILGAVILGFGVWILADKSSFISVLQTSSSSLRMGAYVFIGVGAVTMLMGFLGCIGAVNEVRCLLGLYFAFLLLILIAQVTAGALFYFNMGKLKQEMGGIVTELIRDYNSSREDSLQDAWDYVQAQVKCCGWVSFYNWTDNAELMNRPEVTYPCSCEVKGEEDNSLSVRKGFCEAPGNRTQSGNHPEDWPVYQEGCMEKVQAWLQENLGIILGVGVGVAIIELLGMVLSICLCRHVHSEDYSKVPKYNRISPLVKDTRQSYANSSSFQRHIRKRRSTDFEFDPHSNFYHFTRPLIKPQMSKGEELFTGVVPILVELDGDVNGQKFSVSGEGEGDATYGKLTLKFICTTGKLPVPWPTLVTTLSYGVQCFSRYPDHMKQHDFFKSAMPEGYVQERTIFYKDDGNYKTRAEVKFEGDTLVNRIELKGIDFKEDGNILGHKMEYNYNSHNVYIMADKPKNGIKVNFKIRHNIKDGSVQLADHYQQNTPIGDGPVLLPDNHYLSTQSALSKDPNEKRDHMILLEFVTAAGITHGMDELYK

SEQ ID NO: 74 - protein, 830 aa, Artificial Sequence
  TLR8signal-EYFP-CD82-TLR8Zloop-GFP2
MENMFLQSSMLTCIFLLISGSCELCAMVSKGEELFTGVVPILVELDGDVNGHKFSVSGEGEGDATYGKLTLKFICTTGKLPVPWPTLVTTFGYGLQCFARYPDHMKQHDFFKSAMPEGYVQERTIFFKDDGNYKTRAEVKFEGDTLVNRIELKGIDFKEDGNILGHKLEYNYNSHNVYIMADKQKNGIKVNFKIRHNIEDGSVQLADHYQQNTPIGDGPVLLPDNHYLSYQSALSKDPNEKRDHMVLLEFVTAAGITLGMDELYKSGLRSTGSRMGSACIKVTKYFLFLFNLIFFILGAVILGFGVWILADKSSFISVLQTSSSSLRMGAYVFIGVGAVTMLMGFLGCIGAVNEVRCLLGLYFAFLLLILIAQVTAGALFYFNMGKLKQEMGGIVTELIRDYNSSREDSLQDAWDYVQAQVKCCGWVSFYNWTDNAELMNRPEVTYPCSCEVKGEEDNSLSVRKGFCEAPGNRTQSGNHPEDWPVYQEGCMEKVQAWLQENLGIILGVGVGVAIIELLGMVLSICLCRHVHSEDYSKVPKYNRISPLVKDTRQSYANSSSFQRHIRKRRSTDFEFDPHSNFYHFTRPLIKPQMSKGEELFTGVVPILVELDGDVNGQKFSVSGEGEGDATYGKLTLKFICTTGKLPVPWPTLVTTLSYGVQCFSRYPDHMKQHDFFKSAMPEGYVQERTIFYKDDGNYKTRAEVKFEGDTLVNRIELKGIDFKEDGNILGHKMEYNYNSHNVYIMADKPKNGIKVNFKIRHNIKDGSVQLADHYQQNTPIGDGPVLLPDNHYLSTQSALSKDPNEKRDHMILLEFVTAAGITHGMDELYK

SEQ ID NO: 75 - protein, 830 aa, Artificial Sequence
  TLR8signal-EYFP-TLR8Zloop-CD82-GFP2
MENMFLQSSMLTCIFLLISGSCELCAMVSKGEELFTGVVPILVELDGDVNGHKFSVSGEGEGDATYGKLTLKFICTTGKLPVPWPTLVTTFGYGLQCFARYPDHMKQHDFFKSAMPEGYVQERTIFFKDDGNYKTRAEVKFEGDTLVNRIELKGIDFKEDGNILGHKLEYNYNSHNVYIMADKQKNGIKVNFKIRHNIEDGSVQLADHYQQNTPIGDGPVLLPDNHYLSYQSALSKDPNEKRDHMVLLEFVTAAGITLGMDELYKSGLRSTGSRNRISPLVKDTRQSYANSSSFQRHIRKRRSTDFEFDPHSNFYHFTRPLIKPQMGSACIKVTKYFLFLFNLIFFILGAVILGFGVWILADKSSFISVLQTSSSSLRMGAYVFIGVGAVTMLMGFLGCIGAVNEVRCLLGLYFAFLLLILIAQVTAGALFYFNMGKLKQEMGGIVTELIRDYNSSREDSLQDAWDYVQAQVKCCGWVSFYNWTDNAELMNRPEVTYPCSCEVKGEEDNSLSVRKGFCEAPGNRTQSGNHPEDWPVYQEGCMEKVQAWLQENLGIILGVGVGVAIIELLGMVLSICLCRHVHSEDYSKVPKYMSKGEELFTGVVPILVELDGDVNGQKFSVSGEGEGDATYGKLTLKFICTTGKLPVPWPTLVTTLSYGVQCFSRYPDHMKQHDFFKSAMPEGYVQERTIFYKDDGNYKTRAEVKFEGDTLVNRIELKGIDFKEDGNILGHKMEYNYNSHNVYIMADKPKNGIKVNFKIRHNIKDGSVQLADHYQQNTPIGDGPVLLPDNHYLSTQSALSKDPNEKRDHMILLEFVTAAGITHGMDELYK

SEQ ID NO: 76 - protein, 550 aa, Artificial Sequence
  CD82-TLR9Zloop-GFP2
MGSACIKVTKYFLFLFNLIFFILGAVILGFGVWILADKSSFISVLQTSSSSLRMGAYVFIGVGAVTMLMGFLGCIGAVNEVRCLLGLYFAFLLLILIAQVTAGALFYFNMGKLKQEMGGIVTELIRDYNSSREDSLQDAWDYVQAQVKCCGWVSFYNWTDNAELMNRPEVTYPCSCEVKGEEDNSLSVRKGFCEAPGNRTQSGNHPEDWPVYQEGCMEKVQAWLQENLGIILGVGVGVAIIELLGMVLSICLCRHVHSEDYSKVPKYNRISGASELTATMGEADGGEKVWLQPGDLAPAPVDTPSSEDFRPNMSKGEELFTGVVPILVELDGDVNGQKFSVSGEGEGDATYGKLTLKFICTTGKLPVPWPTLVTTLSYGVQCFSRYPDHMKQHDFFKSAMPEGYVQERTIFYKDDGNYKTRAEVKFEGDTLVNRIELKGIDFKEDGNILGHKMEYNYNSHNVYIMADKPKNGIKVNFKIRHNIKDGSVQLADHYQQNTPIGDGPVLLPDNHYLSTQSALSKDPNEKRDHMILLEFVTAAGITHGMDELYK

SEQ ID NO: 77 - protein, 823 aa, Artificial Sequence
  TLR9signal-EYFP-CD82-TLR9Zloop-GFP2
MGFCRSALHPLSLLVQAIMLAMTLAMVSKGEELFTGVVPILVELDGDVNGHKFSVSGEGEGDATYGKLTLKFICTTGKLPVPWPTLVTTFGYGLQCFARYPDHMKQHDFFKSAMPEGYVQERTIFFKDDGNYKTRAEVKFEGDTLVNRIELKGIDFKEDGNILGHKLEYNYNSHNVYIMADKQKNGIKVNFKIRHNIEDGSVQLADHYQQNTPIGDGPVLLPDNHYLSYQSALSKDPNEKRDHMVLLEFVTAAGITLGMDELYKSGLRSTGSRMGSACIKVTKYFLFLFNLIFFILGAVILGFGVWILADKSSFISVLQTSSSSLRMGAYVFIGVGAVTMLMGFLGCIGAVNEVRCLLGLYFAFLLLILIAQVTAGALFYFNMGKLKQEMGGIVTELIRDYNSSREDSLQDAWDYVQAQVKCCGWVSFYNWTDNAELMNRPEVTYPCSCEVKGEEDNSLSVRKGFCEAPGNRTQSGNHPEDWPVYQEGCMEKVQAWLQENLGIILGVGVGVAIIELLGMVLSICLCRHVHSEDYSKVPKYNRISGASELTATMGEADGGEKVWLQPGDLAPAPVDTPSSEDFRPNMSKGEELFTGVVPILVELDGDVNGQKFSVSGEGEGDATYGKLTLKFICTTGKLPVPWPTLVTTLSYGVQCFSRYPDHMKQHDFFKSAMPEGYVQERTIFYKDDGNYKTRAEVKFEGDTLVNRIELKGIDFKEDGNILGHKMEYNYNSHNVYIMADKPKNGIKVNFKIRHNIKDGSVQLADHYQQNTPIGDGPVLLPDNHYLSTQSALSKDPNEKRDHMILLEFVTAAGITHGMDELYK

SEQ ID NO: 78 - protein, 823 aa, Artificial Sequence
  TLR9signal-EYFP-TLR9Zloop-CD82-GFP2
MGFCRSALHPLSLLVQAIMLAMTLAMVSKGEELFTGVVPILVELDGDVNGHKFSVSGEGEGDATYGKLTLKFICTTGKLPVPWPTLVTTFGYGLQCFARYPDHMKQHDFFKSAMPEGYVQERTIFFKDDGNYKTRAEVKFEGDTLVNRIELKGIDFKEDGNILGHKLEYNYNSHNVYIMADKQKNGIKVNFKIRHNIEDGSVQLADHYQQNTPIGDGPVLLPDNHYLSYQSALSKDPNEKRDHMVLLEFVTAAGITLGMDELYKSGLRSTGSRNRISGASELTATMGEADGGEKVWLQPGDLAPAPVDTPSSEDFRPNMGSACIKVTKYFLFLFNLIFFILGAVILGFGVWILADKSSFISVLQTSSSSLRMGAYVFIGVGAVTMLMGFLGCIGAVNEVRCLLGLYFAFLLLILIAQVTAGALFYFNMGKLKQEMGGIVTELIRDYNSSREDSLQDAWDYVQAQVKCCGWVSFYNWTDNAELMNRPEVTYPCSCEVKGEEDNSLSVRKGFCEAPGNRTQSGNHPEDWPVYQEGCMEKVQAWLQENLGIILGVGVGVAIIELLGMVLSICLCRHVHSEDYSKVPKYMSKGEELFTGVVPILVELDGDVNGQKFSVSGEGEGDATYGKLTLKFICTTGKLPVPWPTLVTTLSYGVQCFSRYPDHMKQHDFFKSAMPEGYVQERTIFYKDDGNYKTRAEVKFEGDTLVNRIELKGIDFKEDGNILGHKMEYNYNSHNVYIMADKPKNGIKVNFKIRHNIKDGSVQLADHYQQNTPIGDGPVLLPDNHYLSTQSALSKDPNEKRDHMILLEFVTAAGITHGMDELYK

SEQ ID NO: 79 - protein, 519 aa, Artificial Sequence
  CD82-TLR3Zloop-GFP2
MGSACIKVTKYFLFLFNLIFFILGAVILGFGVWILADKSSFISVLQTSSSSLRMGAYVFIGVGAVTMLMGFLGCIGAVNEVRCLLGLYFAFLLLILIAQVTAGALFYFNMGKLKQEMGGIVTELIRDYNSSREDSLQDAWDYVQAQVKCCGWVSFYNWTDNAELMNRPEVTYPCSCEVKGEEDNSLSVRKGFCEAPGNRTQSGNHPEDWPVYQEGCMEKVQAWLQENLGIILGVGVGVAIIELLGMVLSICLCRHVHSEDYSKVPKYSFTKQSISLASLPKMSKGEELFTGVVPILVELDGDVNGQKFSVSGEGEGDATYGKLTLKFICTTGKLPVPWPTLVTTLSYGVQCFSRYPDHMKQHDFFKSAMPEGYVQERTIFYKDDGNYKTRAEVKFEGDTLVNRIELKGIDFKEDGNILGHKMEYNYNSHNVYIMADKPKNGIKVNFKIRHNIKDGSVQLADHYQQNTPIGDGPVLLPDNHYLSTQSALSKDPNEKRDHMILLEFVTAAGITHGMDELYK

SEQ ID NO: 80 - protein, 790 aa, Artificial Sequence
  TLR3signal-EYFP-TLR3Zloop-CD82-GFP2
MRQTLPCIYFWGGLLPFGMLCASMVSKGEELFTGVVPILVELDGDVNGHKFSVSGEGEGDATYGKLTLKFICTTGKLPVPWPTLVTTFGYGLQCFARYPDHMKQHDFFKSAMPEGYVQERTIFFKDDGNYKTRAEVKFEGDTLVNRIELKGIDFKEDGNILGHKLEYNYNSHNVYIMADKQKNGIKVNFKIRHNIEDGSVQLADHYQQNTPIGDGPVLLPDNHYLSYQSALSKDPNEKRDHMVLLEFVTAAGITLGMDELYKSGLRSTGSRSFTKQSISLASLPKMGSACIKVTKYFLFLFNLIFFILGAVILGFGVWILADKSSFISVLQTSSSSLRMGAYVFIGVGAVTMLMGFLGCIGAVNEVRCLLGLYFAFLLLILIAQVTAGALFYFNMGKLKQEMGGIVTELIRDYNSSREDSLQDAWDYVQAQVKCCGWVSFYNWTDNAELMNRPEVTYPCSCEVKGEEDNSLSVRKGFCEAPGNRTQSGNHPEDWPVYQEGCMEKVQAWLQENLGIILGVGVGVAIIELLGMVLSICLCRHVHSEDYSKVPKYMSKGEELFTGVVPILVELDGDVNGQKFSVSGEGEGDATYGKLTLKFICTTGKLPVPWPTLVTTLSYGVQCFSRYPDHMKQHDFFKSAMPEGYVQERTIFYKDDGNYKTRAEVKFEGDTLVNRIELKGIDFKEDGNILGHKMEYNYNSHNVYIMADKPKNGIKVNFKIRHNIKDGSVQLADHYQQNTPIGDGPVLLPDNHYLSTQSALSKDPNEKRDHMILLEFVTAAGITHGMDELYK

SEQ ID NO: 81 - protein, 529 aa, Artificial Sequence
  CD82-TLR3Zloop-scFv15
MGSACIKVTKYFLFLFNLIFFILGAVILGFGVWILADKSSFISVLQTSSSSLRMGAYVFIGVGAVTMLMGFLGCIGAVNEVRCLLGLYFAFLLLILIAQVTAGALFYFNMGKLKQEMGGIVTELIRDYNSSREDSLQDAWDYVQAQVKCCGWVSFYNWTDNAELMNRPEVTYPCSCEVKGEEDNSLSVRKGFCEAPGNRTQSGNHPEDWPVYQEGCMEKVQAWLQENLGIILGVGVGVAIIELLGMVLSICLCRHVHSEDYSKVPKYSFTKQSISLASLPKDIQMTQSPSSLSASVGDRVTITCRASQSIGLYLAWYQQKPGKAPKLLIYAASSLQSGVPSRFSGSGSGTDFTLTISSLQPEDFATYYCQQGNTLSYTFGQGTKVEIKRTVAGGSGGSGGSGGSEVQLVQSGAEVKKPGESLKISCKGSGYSFTNYWVGWVRQMPGKGLEWMGFIDPSDSYTNYAPSFQGQVTISADKSISTAYLQWSSLKASDTAMYYCARELYQGYMDTFDSWGQGTLVTVSSASTK

SEQ ID NO: 82 - protein, 767 aa, Artificial Sequence
  CD82-TLR3Zloop-GFP2-scFv15
MGSACIKVTKYFLFLFNLIFFILGAVILGFGVWILADKSSFISVLQTSSSSLRMGAYVFIGVGAVTMLMGFLGCIGAVNEVRCLLGLYFAFLLLILIAQVTAGALFYFNMGKLKQEMGGIVTELIRDYNSSREDSLQDAWDYVQAQVKCCGWVSFYNWTDNAELMNRPEVTYPCSCEVKGEEDNSLSVRKGFCEAPGNRTQSGNHPEDWPVYQEGCMEKVQAWLQENLGIILGVGVGVAIIELLGMVLSICLCRHVHSEDYSKVPKYSFTKQSISLASLPKMSKGEELFTGVVPILVELDGDVNGQKFSVSGEGEGDATYGKLTLKFICTTGKLPVPWPTLVTTLSYGVQCFSRYPDHMKQHDFFKSAMPEGYVQERTIFYKDDGNYKTRAEVKFEGDTLVNRIELKGIDFKEDGNILGHKMEYNYNSHNVYIMADKPKNGIKVNFKIRHNIKDGSVQLADHYQQNTPIGDGPVLLPDNHYLSTQSALSKDPNEKRDHMILLEFVTAAGITHGMDELYKDIQMTQSPSSLSASVGDRVTITCRASQSIGLYLAWYQQKPGKAPKLLIYAASSLQSGVPSRFSGSGSGTDFTLTISSLQPEDFATYYCQQGNTLSYTFGQGTKVEIKRTVAGGSGGSGGSGGSEVQLVQSGAEVKKPGESLKISCKGSGYSFTNYWVGWVRQMPGKGLEWMGFIDPSDSYTNYAPSFQGQVTISADKSISTAYLQWSSLKASDTAMYYCARELYQGYMDTFDSWGQGTLVTVSSASTK

SEQ ID NO: 83 - protein, 1038 aa, Artificial Sequence
  TLR3signal-scFv15-EYFP-TLR3Zloop-CD82-GFP2
MRQTLPCIYFWGGLLPFGMLCASDIQMTQSPSSLSASVGDRVTITCRASQSIGLYLAWYQQKPGKAPKLLIYAASSLQSGVPSRFSGSGSGTDFTLTISSLQPEDFATYYCQQGNTLSYTFGQGTKVEIKRTVAGGSGGSGGSGGSEVQLVQSGAEVKKPGESLKISCKGSGYSFTNYWVGWVRQMPGKGLEWMGFIDPSDSYTNYAPSFQGQVTISADKSISTAYLQWSSLKASDTAMYYCARELYQGYMDTFDSWGQGTLVTVSSASTKMVSKGEELFTGVVPILVELDGDVNGHKFSVSGEGEGDATYGKLTLKFICTTGKLPVPWPTLVTTFGYGLQCFARYPDHMKQHDFFKSAMPEGYVQERTIFFKDDGNYKTRAEVKFEGDTLVNRIELKGIDFKEDGNILGHKLEYNYNSHNVYIMADKQKNGIKVNFKIRHNIEDGSVQLADHYQQNTPIGDGPVLLPDNHYLSYQSALSKDPNEKRDHMVLLEFVTAAGITLGMDELYKSGLRSTGSRSFTKQSISLASLPKMGSACIKVTKYFLFLFNLIFFILGAVILGFGVWILADKSSFISVLQTSSSSLRMGAYVFIGVGAVTMLMGFLGCIGAVNEVRCLLGLYFAFLLLILIAQVTAGALFYFNMGKLKQEMGGIVTELIRDYNSSREDSLQDAWDYVQAQVKCCGWVSFYNWTDNAELMNRPEVTYPCSCEVKGEEDNSLSVRKGFCEAPGNRTQSGNHPEDWPVYQEGCMEKVQAWLQENLGIILGVGVGVAIIELLGMVLSICLCRHVHSEDYSKVPKYMSKGEELFTGVVPILVELDGDVNGQKFSVSGEGEGDATYGKLTLKFICTTGKLPVPWPTLVTTLSYGVQCFSRYPDHMKQHDFFKSAMPEGYVQERTIFYKDDGNYKTRAEVKFEGDTLVNRIELKGIDFKEDGNILGHKMEYNYNSHNVYIMADKPKNGIKVNFKIRHNIKDGSVQLADHYQQNTPIGDGPVLLPDNHYLSTQSALSKDPNEKRDHMILLEFVTAAGITHGMDELYK

SEQ ID NO: 84 - protein, 552 aa, Artificial Sequence
  TLR3signal-scFv15-TLR3Zloop-CD82
MRQTLPCIYFWGGLLPFGMLCASDIQMTQSPSSLSASVGDRVTITCRASQSIGLYLAWYQQKPGKAPKLLIYAASSLQSGVPSRFSGSGSGTDFTLTISSLQPEDFATYYCQQGNTLSYTFGQGTKVEIKRTVAGGSGGSGGSGGSEVQLVQSGAEVKKPGESLKISCKGSGYSFTNYWVGWVRQMPGKGLEWMGFIDPSDSYTNYAPSFQGQVTISADKSISTAYLQWSSLKASDTAMYYCARELYQGYMDTFDSWGQGTLVTVSSASTKSFTKQSISLASLPKMGSACIKVTKYFLFLFNLIFFILGAVILGFGVWILADKSSFISVLQTSSSSLRMGAYVFIGVGAVTMLMGFLGCIGAVNEVRCLLGLYFAFLLLILIAQVTAGALFYFNMGKLKQEMGGIVTELIRDYNSSREDSLQDAWDYVQAQVKCCGWVSFYNWTDNAELMNRPEVTYPCSCEVKGEEDNSLSVRKGFCEAPGNRTQSGNHPEDWPVYQEGCMEKVQAWLQENLGIILGVGVGVAIIELLGMVLSICLCRHVHSEDYSKVPKY

SEQ ID NO: 85 - protein, 532 aa, Artificial Sequence
  CD82-TLR3Zloop-scFv12
MGSACIKVTKYFLFLFNLIFFILGAVILGFGVWILADKSSFISVLQTSSSSLRMGAYVFIGVGAVTMLMGFLGCIGAVNEVRCLLGLYFAFLLLILIAQVTAGALFYFNMGKLKQEMGGIVTELIRDYNSSREDSLQDAWDYVQAQVKCCGWVSFYNWTDNAELMNRPEVTYPCSCEVKGEEDNSLSVRKGFCEAPGNRTQSGNHPEDWPVYQEGCMEKVQAWLQENLGIILGVGVGVAIIELLGMVLSICLCRHVHSEDYSKVPKYSFTKQSISLASLPKQSVLTQPPSVSVAPGQTARISCSGDNIGSYYVHWYQQKPGQAPVLVIYEDSERPSGIPERFSGSNSGNTATLTISGTQAEDEADYYCSSYDDPNFQVFGGGTKLTVLGQPKAAGGSGGSGGSGGSQVQLQQSGPGLVKPSQTLSLTCAISGDSVSSNSAAWGWIRQSPGRGLEWLGIIQKRSKWYNNYAVSVKSRITINPDTSKNQFSLQLNSVTPEDTAVYYCARYSYPFYSIDYWGQGTLVTVSSASTK

SEQ ID NO: 86 - protein, 770 aa, Artificial Sequence
  CD82-TLR3Zloop-GFP2-scFv12
MGSACIKVTKYFLFLFNLIFFILGAVILGFGVWILADKSSFISVLQTSSSSLRMGAYVFIGVGAVTMLMGFLGCIGAVNEVRCLLGLYFAFLLLILIAQVTAGALFYFNMGKLKQEMGGIVTELIRDYNSSREDSLQDAWDYVQAQVKCCGWVSFYNWTDNAELMNRPEVTYPCSCEVKGEEDNSLSVRKGFCEAPGNRTQSGNHPEDWPVYQEGCMEKVQAWLQENLGIILGVGVGVAIIELLGMVLSICLCRHVHSEDYSKVPKYSFTKQSISLASLPKMSKGEELFTGVVPILVELDGDVNGQKFSVSGEGEGDATYGKLTLKFICTTGKLPVPWPTLVTTLSYGVQCFSRYPDHMKQHDFFKSAMPEGYVQERTIFYKDDGNYKTRAEVKFEGDTLVNRIELKGIDFKEDGNILGHKMEYNYNSHNVYIMADKPKNGIKVNFKIRHNIKDGSVQLADHYQQNTPIGDGPVLLPDNHYLSTQSALSKDPNEKRDHMILLEFVTAAGITHGMDELYKQSVLTQPPSVSVAPGQTARISCSGDNIGSYYVHWYQQKPGQAPVLVIYEDSERPSGIPERFSGSNSGNTATLTISGTQAEDEADYYCSSYDDPNFQVFGGGTKLTVLGQPKAAGGSGGSGGSGGSQVQLQQSGPGLVKPSQTLSLTCAISGDSVSSNSAAWGWIRQSPGRGLEWLGIIQKRSKWYNNYAVSVKSRITINPDTSKNQFSLQLNSVTPEDTAVYYCARYSYPFYSIDYWGQGTLVTVSSASTK

SEQ ID NO: 87 - protein, 1041 aa, Artificial Sequence
  TLR3signal-scFv12-EYFP-TLR3Zloop-CD82-GFP2
MRQTLPCIYFWGGLLPFGMLCASQSVLTQPPSVSVAPGQTARISCSGDNIGSYYVHWYQQKPGQAPVLVIYEDSERPSGIPERFSGSNSGNTATLTISGTQAEDEADYYCSSYDDPNFQVFGGGTKLTVLGQPKAAGGSGGSGGSGGSQVQLQQSGPGLVKPSQTLSLTCAISGDSVSSNSAAWGWIRQSPGRGLEWLGIIQKRSKWYNNYAVSVKSRITINPDTSKNQFSLQLNSVTPEDTAVYYCARYSYPFYSIDYWGQGTLVTVSSASTKMVSKGEELFTGVVPILVELDGDVNGHKFSVSGEGEGDATYGKLTLKFICTTGKLPVPWPTLVTTFGYGLQCFARYPDHMKQHDFFKSAMPEGYVQERTIFFKDDGNYKTRAEVKFEGDTLVNRIELKGIDFKEDGNILGHKLEYNYNSHNVYIMADKQKNGIKVNFKIRHNIEDGSVQLADHYQQNTPIGDGPVLLPDNHYLSYQSALSKDPNEKRDHMVLLEFVTAAGITLGMDELYKSGLRSTGSRSFTKQSISLASLPKMGSACIKVTKYFLFLFNLIFFILGAVILGFGVWILADKSSFISVLQTSSSSLRMGAYVFIGVGAVTMLMGFLGCIGAVNEVRCLLGLYFAFLLLILIAQVTAGALFYFNMGKLKQEMGGIVTELIRDYNSSREDSLQDAWDYVQAQVKCCGWVSFYNWTDNAELMNRPEVTYPCSCEVKGEEDNSLSVRKGFCEAPGNRTQSGNHPEDWPVYQEGCMEKVQAWLQENLGIILGVGVGVAIIELLGMVLSICLCRHVHSEDYSKVPKYMSKGEELFTGVVPILVELDGDVNGQKFSVSGEGEGDATYGKLTLKFICTTGKLPVPWPTLVTTLSYGVQCFSRYPDHMKQHDFFKSAMPEGYVQERTIFYKDDGNYKTRAEVKFEGDTLVNRIELKGIDFKEDGNILGHKMEYNYNSHNVYIMADKPKNGIKVNFKIRHNIKDGSVQLADHYQQNTPIGDGPVLLPDNHYLSTQSALSKDPNEKRDHMILLEFVTAAGITHGMDELYK

SEQ ID NO: 88 - protein, 555 aa, Artificial Sequence
  TLR3signal-scFv12-TLR3Zloop-CD82
MRQTLPCIYFWGGLLPFGMLCASQSVLTQPPSVSVAPGQTARISCSGDNIGSYYVHWYQQKPGQAPVLVIYEDSERPSGIPERFSGSNSGNTATLTISGTQAEDEADYYCSSYDDPNFQVFGGGTKLTVLGQPKAAGGSGGSGGSGGSQVQLQQSGPGLVKPSQTLSLTCAISGDSVSSNSAAWGWIRQSPGRGLEWLGIIQKRSKWYNNYAVSVKSRITINPDTSKNQFSLQLNSVTPEDTAVYYCARYSYPFYSIDYWGQGTLVTVSSASTKSFTKQSISLASLPKMGSACIKVTKYFLFLFNLIFFILGAVILGFGVWILADKSSFISVLQTSSSSLRMGAYVFIGVGAVTMLMGFLGCIGAVNEVRCLLGLYFAFLLLILIAQVTAGALFYFNMGKLKQEMGGIVTELIRDYNSSREDSLQDAWDYVQAQVKCCGWVSFYNWTDNAELMNRPEVTYPCSCEVKGEEDNSLSVRKGFCEAPGNRTQSGNHPEDWPVYQEGCMEKVQAWLQENLGIILGVGVGVAIIELLGMVLSICLCRHVHSEDYSKVPKY

SEQ ID NO: 89 - protein, 529 aa, Artificial Sequence
  CD82-TLR3Zloop-scFv1068
MGSACIKVTKYFLFLFNLIFFILGAVILGFGVWILADKSSFISVLQTSSSSLRMGAYVFIGVGAVTMLMGFLGCIGAVNEVRCLLGLYFAFLLLILIAQVTAGALFYFNMGKLKQEMGGIVTELIRDYNSSREDSLQDAWDYVQAQVKCCGWVSFYNWTDNAELMNRPEVTYPCSCEVKGEEDNSLSVRKGFCEAPGNRTQSGNHPEDWPVYQEGCMEKVQAWLQENLGIILGVGVGVAIIELLGMVLSICLCRHVHSEDYSKVPKYSFTKQSISLASLPKDIQMTQSPASLSASVGETVTITCRASGNIHNYLAWYQQKQGKSPQLLVYNAKTLADGVPSRFSGSESGTQYSLKINSLQPEDFGSYYCQHFWSTPFTFGSGTKLELKRGTVAAGGSGGSGGSGGSQVQLQQPGAELVQPGTSVRLSCKASGYIFTTYWIHWVKQRPGQGLEWIGEINPNNGRINYNEKFKTKATLTVDKSSSTAYMQLSSLTSEDSAVYYCTRVGVMITTFPYWGQGTLVTVSAASTK

SEQ ID NO: 90 - protein, 767 aa, Artificial Sequence
  CD82-TLR3Zloop-GFP2-scFv1068
MGSACIKVTKYFLFLFNLIFFILGAVILGFGVWILADKSSFISVLQTSSSSLRMGAYVFIGVGAVTMLMGFLGCIGAVNEVRCLLGLYFAFLLLILIAQVTAGALFYFNMGKLKQEMGGIVTELIRDYNSSREDSLQDAWDYVQAQVKCCGWVSFYNWTDNAELMNRPEVTYPCSCEVKGEEDNSLSVRKGFCEAPGNRTQSGNHPEDWPVYQEGCMEKVQAWLQENLGIILGVGVGVAIIELLGMVLSICLCRHVHSEDYSKVPKYSFTKQSISLASLPKMSKGEELFTGVVPILVELDGDVNGQKFSVSGEGEGDATYGKLTLKFICTTGKLPVPWPTLVTTLSYGVQCFSRYPDHMKQHDFFKSAMPEGYVQERTIFYKDDGNYKTRAEVKFEGDTLVNRIELKGIDFKEDGNILGHKMEYNYNSHNVYIMADKPKNGIKVNFKIRHNIKDGSVQLADHYQQNTPIGDGPVLLPDNHYLSTQSALSKDPNEKRDHMILLEFVTAAGITHGMDELYKDIQMTQSPASLSASVGETVTITCRASGNIHNYLAWYQQKQGKSPQLLVYNAKTLADGVPSRFSGSESGTQYSLKINSLQPEDFGSYYCQHFWSTPFTFGSGTKLELKRGTVAAGGSGGSGGSGGSQVQLQQPGAELVQPGTSVRLSCKASGYIFTTYWIHWVKQRPGQGLEWIGEINPNNGRINYNEKFKTKATLTVDKSSSTAYMQLSSLTSEDSAVYYCTRVGVMITTFPYWGQGTLVTVSAASTK

SEQ ID NO: 91 - protein, 1038 aa, Artificial Sequence
  TLR3signal-scFv1068-EYFP-TLR3Zloop-CD82-GFP2
MRQTLPCIYFWGGLLPFGMLCASDIQMTQSPASLSASVGETVTITCRASGNIHNYLAWYQQKQGKSPQLLVYNAKTLADGVPSRFSGSESGTQYSLKINSLQPEDFGSYYCQHFWSTPFTFGSGTKLELKRGTVAAGGSGGSGGSGGSQVQLQQPGAELVQPGTSVRLSCKASGYIFTTYWIHWVKQRPGQGLEWIGEINPNNGRINYNEKFKTKATLTVDKSSSTAYMQLSSLTSEDSAVYYCTRVGVMITTFPYWGQGTLVTVSAASTKMVSKGEELFTGVVPILVELDGDVNGHKFSVSGEGEGDATYGKLTLKFICTTGKLPVPWPTLVTTFGYGLQCFARYPDHMKQHDFFKSAMPEGYVQERTIFFKDDGNYKTRAEVKFEGDTLVNRIELKGIDFKEDGNILGHKLEYNYNSHNVYIMADKQKNGIKVNFKIRHNIEDGSVQLADHYQQNTPIGDGPVLLPDNHYLSYQSALSKDPNEKRDHMVLLEFVTAAGITLGMDELYKSGLRSTGSRSFTKQSISLASLPKMGSACIKVTKYFLFLFNLIFFILGAVILGFGVWILADKSSFISVLQTSSSSLRMGAYVFIGVGAVTMLMGFLGCIGAVNEVRCLLGLYFAFLLLILIAQVTAGALFYFNMGKLKQEMGGIVTELIRDYNSSREDSLQDAWDYVQAQVKCCGWVSFYNWTDNAELMNRPEVTYPCSCEVKGEEDNSLSVRKGFCEAPGNRTQSGNHPEDWPVYQEGCMEKVQAWLQENLGIILGVGVGVAIIELLGMVLSICLCRHVHSEDYSKVPKYMSKGEELFTGVVPILVELDGDVNGQKFSVSGEGEGDATYGKLTLKFICTTGKLPVPWPTLVTTLSYGVQCFSRYPDHMKQHDFFKSAMPEGYVQERTIFYKDDGNYKTRAEVKFEGDTLVNRIELKGIDFKEDGNILGHKMEYNYNSHNVYIMADKPKNGIKVNFKIRHNIKDGSVQLADHYQQNTPIGDGPVLLPDNHYLSTQSALSKDPNEKRDHMILLEFVTAAGITHGMDELYK

SEQ ID NO: 92 - protein, 552 aa, Artificial Sequence
  TLR3signal-scFv1068-TLR3Zloop-CD82
MRQTLPCIYFWGGLLPFGMLCASDIQMTQSPASLSASVGETVTITCRASGNIHNYLAWYQQKQGKSPQLLVYNAKTLADGVPSRFSGSESGTQYSLKINSLQPEDFGSYYCQHFWSTPFTFGSGTKLELKRGTVAAGGSGGSGGSGGSQVQLQQPGAELVQPGTSVRLSCKASGYIFTTYWIHWVKQRPGQGLEWIGEINPNNGRINYNEKFKTKATLTVDKSSSTAYMQLSSLTSEDSAVYYCTRVGVMITTFPYWGQGTLVTVSAASTKSFTKQSISLASLPKMGSACIKVTKYFLFLFNLIFFILGAVILGFGVWILADKSSFISVLQTSSSSLRMGAYVFIGVGAVTMLMGFLGCIGAVNEVRCLLGLYFAFLLLILIAQVTAGALFYFNMGKLKQEMGGIVTELIRDYNSSREDSLQDAWDYVQAQVKCCGWVSFYNWTDNAELMNRPEVTYPCSCEVKGEEDNSLSVRKGFCEAPGNRTQSGNHPEDWPVYQEGCMEKVQAWLQENLGIILGVGVGVAIIELLGMVLSICLCRHVHSEDYSKVPKY

SEQ ID NO: 93 - protein, 579 aa, Artificial Sequence
  CD37-TLR7Zloop-GFP2
MSAQESCLSLIKYFLFVFNLFFFVLGSLIFCFGIWILIDKTSFVSFVGLAFVPLQIWSKVLAISGIFTMGIALLGCVGALKELRCLLGLYFGMLLLLFATQITLGILISTQRAQLERSLRDVVEKTIQKYGTNPEETAAEESWDYVQFQLRCCGWHYPQDWFQVLILRGNGSEAHRVPCSCYNLSATNDSTILDKVILPQLSRLGHLARSRHSADICAVPAESHIYREGCAQGLQKWLHNNLISIVGICLGVGLLELGFMTLSIFLCRNLDHVYNRLARYRNKISPSGDSSEVGFCSNARTSVESYEPQVLEQLHYFRYDKYARSCRFKNKEASFMSVNESMSKGEELFTGVVPILVELDGDVNGQKFSVSGEGEGDATYGKLTLKFICTTGKLPVPWPTLVTTLSYGVQCFSRYPDHMKQHDFFKSAMPEGYVQERTIFYKDDGNYKTRAEVKFEGDTLVNRIELKGIDFKEDGNILGHKMEYNYNSHNVYIMADKPKNGIKVNFKIRHNIKDGSVQLADHYQQNTPIGDGPVLLPDNHYLSTQSALSKDPNEKRDHMILLEFVTAAGITHGMDELYK

SEQ ID NO: 94 - protein, 853 aa, Artificial Sequence
  TLR7signal-EYFP-CD37-TLR7Zloop-GFP2
MVFPMWTLKRQILILFNIILISKLLGMVSKGEELFTGVVPILVELDGDVNGHKFSVSGEGEGDATYGKLTLKFICTTGKLPVPWPTLVTTFGYGLQCFARYPDHMKQHDFFKSAMPEGYVQERTIFFKDDGNYKTRAEVKFEGDTLVNRIELKGIDFKEDGNILGHKLEYNYNSHNVYIMADKQKNGIKVNFKIRHNIEDGSVQLADHYQQNTPIGDGPVLLPDNHYLSYQSALSKDPNEKRDHMVLLEFVTAAGITLGMDELYKSGLRSTGSRMSAQESCLSLIKYFLFVFNLFFFVLGSLIFCFGIWILIDKTSFVSFVGLAFVPLQIWSKVLAISGIFTMGIALLGCVGALKELRCLLGLYFGMLLLLFATQITLGILISTQRAQLERSLRDVVEKTIQKYGTNPEETAAEESWDYVQFQLRCCGWHYPQDWFQVLILRGNGSEAHRVPCSCYNLSATNDSTILDKVILPQLSRLGHLARSRHSADICAVPAESHIYREGCAQGLQKWLHNNLISIVGICLGVGLLELGFMTLSIFLCRNLDHVYNRLARYRNKISPSGDSSEVGFCSNARTSVESYEPQVLEQLHYFRYDKYARSCRFKNKEASFMSVNESMSKGEELFTGVVPILVELDGDVNGQKFSVSGEGEGDATYGKLTLKFICTTGKLPVPWPTLVTTLSYGVQCFSRYPDHMKQHDFFKSAMPEGYVQERTIFYKDDGNYKTRAEVKFEGDTLVNRIELKGIDFKEDGNILGHKMEYNYNSHNVYIMADKPKNGIKVNFKIRHNIKDGSVQLADHYQQNTPIGDGPVLLPDNHYLSTQSALSKDPNEKRDHMILLEFVTAAGITHGMDELYK

SEQ ID NO: 95 - protein, 853 aa, Artificial Sequence
  TLR7signal-EYFP-TLR7Zloop-CD37-GFP2
MVFPMWTLKRQILILFNIILISKLLGMVSKGEELFTGVVPILVELDGDVNGHKFSVSGEGEGDATYGKLTLKFICTTGKLPVPWPTLVTTFGYGLQCFARYPDHMKQHDFFKSAMPEGYVQERTIFFKDDGNYKTRAEVKFEGDTLVNRIELKGIDFKEDGNILGHKLEYNYNSHNVYIMADKQKNGIKVNFKIRHNIEDGSVQLADHYQQNTPIGDGPVLLPDNHYLSYQSALSKDPNEKRDHMVLLEFVTAAGITLGMDELYKSGLRSTGSRNKISPSGDSSEVGFCSNARTSVESYEPQVLEQLHYFRYDKYARSCRFKNKEASFMSVNESMSAQESCLSLIKYFLFVFNLFFFVLGSLIFCFGIWILIDKTSFVSFVGLAFVPLQIWSKVLAISGIFTMGIALLGCVGALKELRCLLGLYFGMLLLLFATQITLGILISTQRAQLERSLRDVVEKTIQKYGTNPEETAAEESWDYVQFQLRCCGWHYPQDWFQVLILRGNGSEAHRVPCSCYNLSATNDSTILDKVILPQLSRLGHLARSRHSADICAVPAESHIYREGCAQGLQKWLHNNLISIVGICLGVGLLELGFMTLSIFLCRNLDHVYNRLARYRMSKGEELFTGVVPILVELDGDVNGQKFSVSGEGEGDATYGKLTLKFICTTGKLPVPWPTLVTTLSYGVQCFSRYPDHMKQHDFFKSAMPEGYVQERTIFYKDDGNYKTRAEVKFEGDTLVNRIELKGIDFKEDGNILGHKMEYNYNSHNVYIMADKPKNGIKVNFKIRHNIKDGSVQLADHYQQNTPIGDGPVLLPDNHYLSTQSALSKDPNEKRDHMILLEFVTAAGITHGMDELYK

SEQ ID NO: 96 - protein, 570 aa, Artificial Sequence
  CD37-TLR8Zloop-GFP2
MSAQESCLSLIKYFLFVFNLFFFVLGSLIFCFGIWILIDKTSFVSFVGLAFVPLQIWSKVLAISGIFTMGIALLGCVGALKELRCLLGLYFGMLLLLFATQITLGILISTQRAQLERSLRDVVEKTIQKYGTNPEETAAEESWDYVQFQLRCCGWHYPQDWFQVLILRGNGSEAHRVPCSCYNLSATNDSTILDKVILPQLSRLGHLARSRHSADICAVPAESHIYREGCAQGLQKWLHNNLISIVGICLGVGLLELGFMTLSIFLCRNLDHVYNRLARYRNRISPLVKDTRQSYANSSSFQRHIRKRRSTDFEFDPHSNFYHFTRPLIKPQMSKGEELFTGVVPILVELDGDVNGQKFSVSGEGEGDATYGKLTLKFICTTGKLPVPWPTLVTTLSYGVQCFSRYPDHMKQHDFFKSAMPEGYVQERTIFYKDDGNYKTRAEVKFEGDTLVNRIELKGIDFKEDGNILGHKMEYNYNSHNVYIMADKPKNGIKVNFKIRHNIKDGSVQLADHYQQNTPIGDGPVLLPDNHYLSTQSALSKDPNEKRDHMILLEFVTAAGITHGMDELYK

SEQ ID NO: 97 - protein, 831 aa, Artificial Sequence
  TLR8signal-EYFP-CD37-TLR8Zloop-GFP2
MENMFLQSSMLTCIFLLISGSCELCAMVSKGEELFTGVVPILVELDGDVNGHKFSVSGEGEGDATYGKLTLKFICTTGKLPVPWPTLVTTFGYGLQCFARYPDHMKQHDFFKSAMPEGYVQERTIFFKDDGNYKTRAEVKFEGDTLVNRIELKGIDFKEDGNILGHKLEYNYNSHNVYIMADKQKNGIKVNFKIRHNIEDGSVQLADHYQQNTPIGDGPVLLPDNHYLSYQSALSKDPNEKRDHMVLLEFVTAAGITLGMDELYKSGLRSTGSRMSAQESCLSLIKYFLFVFNLFFFVLGSLIFCFGIWILIDKTSFVSFVGLAFVPLQIWSKVLAISGIFTMGIALLGCVGALKELRCLLGLYFGMLLLLFATQITLGILISTQRAQLERSLRDVVEKTIQKYGTNPEETAAEESWDYVQFQLRCCGWHYPQDWFQVLILRGNGSEAHRVPCSCYNLSATNDSTILDKVILPQLSRLGHLARSRHSADICAVPAESHIYREGCAQGLQKWLHNNLISIVGICLGVGLLELGFMTLSIFLCRNLDHVYNRLARYRNRISPLVKDTRQSYANSSSFQRHIRKRRSTDFEFDPHSNFYHFTRPLIKPQMSKGEELFTGVVPILVELDGDVNGQKFSVSGEGEGDATYGKLTLKFICTTGKLPVPWPTLVTTLSYGVQCFSRYPDHMKQHDFFKSAMPEGYVQERTIFYKDDGNYKTRAEVKFEGDTLVNRIELKGIDFKEDGNILGHKMEYNYNSHNVYIMADKPKNGIKVNFKIRHNIKDGSVQLADHYQQNTPIGDGPVLLPDNHYLSTQSALSKDPNEKRDHMILLEFVT

SEQ ID NO: 98 - protein, 844 aa, Artificial Sequence
  TLR8signal-EYFP-TLR8Zloop-CD37-GFP2
MENMFLQSSMLTCIFLLISGSCELCAMVSKGEELFTGVVPILVELDGDVNGHKFSVSGEGEGDATYGKLTLKFICTTGKLPVPWPTLVTTFGYGLQCFARYPDHMKQHDFFKSAMPEGYVQERTIFFKDDGNYKTRAEVKFEGDTLVNRIELKGIDFKEDGNILGHKLEYNYNSHNVYIMADKQKNGIKVNFKIRHNIEDGSVQLADHYQQNTPIGDGPVLLPDNHYLSYQSALSKDPNEKRDHMVLLEFVTAAGITLGMDELYKSGLRSTGSRNRISPLVKDTRQSYANSSSFQRHIRKRRSTDFEFDPHSNFYHFTRPLIKPQMSAQESCLSLIKYFLFVFNLFFFVLGSLIFCFGIWILIDKTSFVSFVGLAFVPLQIWSKVLAISGIFTMGIALLGCVGALKELRCLLGLYFGMLLLLFATQITLGILISTQRAQLERSLRDVVEKTIQKYGTNPEETAAEESWDYVQFQLRCCGWHYPQDWFQVLILRGNGSEAHRVPCSCYNLSATNDSTILDKVILPQLSRLGHLARSRHSADICAVPAESHIYREGCAQGLQKWLHNNLISIVGICLGVGLLELGFMTLSIFLCRNLDHVYNRLARYRMSKGEELFTGVVPILVELDGDVNGQKFSVSGEGEGDATYGKLTLKFICTTGKLPVPWPTLVTTLSYGVQCFSRYPDHMKQHDFFKSAMPEGYVQERTIFYKDDGNYKTRAEVKFEGDTLVNRIELKGIDFKEDGNILGHKMEYNYNSHNVYIMADKPKNGIKVNFKIRHNIKDGSVQLADHYQQNTPIGDGPVLLPDNHYLSTQSALSKDPNEKRDHMILLEFVTAAGITHGMDELYK

SEQ ID NO: 99 - protein, 564 aa, Artificial Sequence
  CD37-TLR9Zloop-GFP2
MSAQESCLSLIKYFLFVFNLFFFVLGSLIFCFGIWILIDKTSFVSFVGLAFVPLQIWSKVLAISGIFTMGIALLGCVGALKELRCLLGLYFGMLLLLFATQITLGILISTQRAQLERSLRDVVEKTIQKYGTNPEETAAEESWDYVQFQLRCCGWHYPQDWFQVLILRGNGSEAHRVPCSCYNLSATNDSTILDKVILPQLSRLGHLARSRHSADICAVPAESHIYREGCAQGLQKWLHNNLISIVGICLGVGLLELGFMTLSIFLCRNLDHVYNRLARYRNRISGASELTATMGEADGGEKVWLQPGDLAPAPVDTPSSEDFRPNMSKGEELFTGVVPILVELDGDVNGQKFSVSGEGEGDATYGKLTLKFICTTGKLPVPWPTLVTTLSYGVQCFSRYPDHMKQHDFFKSAMPEGYVQERTIFYKDDGNYKTRAEVKFEGDTLVNRIELKGIDFKEDGNILGHKMEYNYNSHNVYIMADKPKNGIKVNFKIRHNIKDGSVQLADHYQQNTPIGDGPVLLPDNHYLSTQSALSKDPNEKRDHMILLEFVTAAGITHGMDELYK

SEQ ID NO: 100 - protein, 837 aa, Artificial Sequence
  TLR9signal-EYFP-CD37-TLR9Zloop-GFP2
MGFCRSALHPLSLLVQAIMLAMTLAMVSKGEELFTGVVPILVELDGDVNGHKFSVSGEGEGDATYGKLTLKFICTTGKLPVPWPTLVTTFGYGLQCFARYPDHMKQHDFFKSAMPEGYVQERTIFFKDDGNYKTRAEVKFEGDTLVNRIELKGIDFKEDGNILGHKLEYNYNSHNVYIMADKQKNGIKVNFKIRHNIEDGSVQLADHYQQNTPIGDGPVLLPDNHYLSYQSALSKDPNEKRDHMVLLEFVTAAGITLGMDELYKSGLRSTGSRMSAQESCLSLIKYFLFVFNLFFFVLGSLIFCFGIWILIDKTSFVSFVGLAFVPLQIWSKVLAISGIFTMGIALLGCVGALKELRCLLGLYFGMLLLLFATQITLGILISTQRAQLERSLRDVVEKTIQKYGTNPEETAAEESWDYVQFQLRCCGWHYPQDWFQVLILRGNGSEAHRVPCSCYNLSATNDSTILDKVILPQLSRLGHLARSRHSADICAVPAESHIYREGCAQGLQKWLHNNLISIVGICLGVGLLELGFMTLSIFLCRNLDHVYNRLARYRNRISGASELTATMGEADGGEKVWLQPGDLAPAPVDTPSSEDFRPNMSKGEELFTGVVPILVELDGDVNGQKFSVSGEGEGDATYGKLTLKFICTTGKLPVPWPTLVTTLSYGVQCFSRYPDHMKQHDFFKSAMPEGYVQERTIFYKDDGNYKTRAEVKFEGDTLVNRIELKGIDFKEDGNILGHKMEYNYNSHNVYIMADKPKNGIKVNFKIRHNIKDGSVQLADHYQQNTPIGDGPVLLPDNHYLSTQSALSKDPNEKRDHMILLEFVTAAGITHGMDELYK

SEQ ID NO: 101 - protein, 837 aa, Artificial Sequence
  TLR9signal-EYFP-TLR9Zloop-CD37-GFP2
MGFCRSALHPLSLLVQAIMLAMTLAMVSKGEELFTGVVPILVELDGDVNGHKFSVSGEGEGDATYGKLTLKFICTTGKLPVPWPTLVTTFGYGLQCFARYPDHMKQHDFFKSAMPEGYVQERTIFFKDDGNYKTRAEVKFEGDTLVNRIELKGIDFKEDGNILGHKLEYNYNSHNVYIMADKQKNGIKVNFKIRHNIEDGSVQLADHYQQNTPIGDGPVLLPDNHYLSYQSALSKDPNEKRDHMVLLEFVTAAGITLGMDELYKSGLRSTGSRNRISGASELTATMGEADGGEKVWLQPGDLAPAPVDTPSSEDFRPNMSAQESCLSLIKYFLFVFNLFFFVLGSLIFCFGIWILIDKTSFVSFVGLAFVPLQIWSKVLAISGIFTMGIALLGCVGALKELRCLLGLYFGMLLLLFATQITLGILISTQRAQLERSLRDVVEKTIQKYGTNPEETAAEESWDYVQFQLRCCGWHYPQDWFQVLILRGNGSEAHRVPCSCYNLSATNDSTILDKVILPQLSRLGHLARSRHSADICAVPAESHIYREGCAQGLQKWLHNNLISIVGICLGVGLLELGFMTLSIFLCRNLDHVYNRLARYRMSKGEELFTGVVPILVELDGDVNGQKFSVSGEGEGDATYGKLTLKFICTTGKLPVPWPTLVTTLSYGVQCFSRYPDHMKQHDFFKSAMPEGYVQERTIFYKDDGNYKTRAEVKFEGDTLVNRIELKGIDFKEDGNILGHKMEYNYNSHNVYIMADKPKNGIKVNFKIRHNIKDGSVQLADHYQQNTPIGDGPVLLPDNHYLSTQSALSKDPNEKRDHMILLEFVTAAGITHGMDELYK

SEQ ID NO: 102 - protein, 533 aa, Artificial Sequence
  CD37-TLR3Zloop-GFP2
MSAQESCLSLIKYFLFVFNLFFFVLGSLIFCFGIWILIDKTSFVSFVGLAFVPLQIWSKVLAISGIFTMGIALLGCVGALKELRCLLGLYFGMLLLLFATQITLGILISTQRAQLERSLRDVVEKTIQKYGTNPEETAAEESWDYVQFQLRCCGWHYPQDWFQVLILRGNGSEAHRVPCSCYNLSATNDSTILDKVILPQLSRLGHLARSRHSADICAVPAESHIYREGCAQGLQKWLHNNLISIVGICLGVGLLELGFMTLSIFLCRNLDHVYNRLARYRSFTKQSISLASLPKMSKGEELFTGVVPILVELDGDVNGQKFSVSGEGEGDATYGKLTLKFICTTGKLPVPWPTLVTTLSYGVQCFSRYPDHMKQHDFFKSAMPEGYVQERTIFYKDDGNYKTRAEVKFEGDTLVNRIELKGIDFKEDGNILGHKMEYNYNSHNVYIMADKPKNGIKVNFKIRHNIKDGSVQLADHYQQNTPIGDGPVLLPDNHYLSTQSALSKDPNEKRDHMILLEFVTAAGITHGMDELYK

SEQ ID NO: 103 - protein, 804 aa, Artificial Sequence
  TLR3signal-EYFP-TLR3Zloop-CD37-GFP2
MRQTLPCIYFWGGLLPFGMLCASMVSKGEELFTGVVPILVELDGDVNGHKFSVSGEGEGDATYGKLTLKFICTTGKLPVPWPTLVTTFGYGLQCFARYPDHMKQHDFFKSAMPEGYVQERTIFFKDDGNYKTRAEVKFEGDTLVNRIELKGIDFKEDGNILGHKLEYNYNSHNVYIMADKQKNGIKVNFKIRHNIEDGSVQLADHYQQNTPIGDGPVLLPDNHYLSYQSALSKDPNEKRDHMVLLEFVTAAGITLGMDELYKSGLRSTGSRSFTKQSISLASLPKMSAQESCLSLIKYFLFVFNLFFFVLGSLIFCFGIWILIDKTSFVSFVGLAFVPLQIWSKVLAISGIFTMGIALLGCVGALKELRCLLGLYFGMLLLLFATQITLGILISTQRAQLERSLRDVVEKTIQKYGTNPEETAAEESWDYVQFQLRCCGWHYPQDWFQVLILRGNGSEAHRVPCSCYNLSATNDSTILDKVILPQLSRLGHLARSRHSADICAVPAESHIYREGCAQGLQKWLHNNLISIVGICLGVGLLELGFMTLSIFLCRNLDHVYNRLARYRMSKGEELFTGVVPILVELDGDVNGQKFSVSGEGEGDATYGKLTLKFICTTGKLPVPWPTLVTTLSYGVQCFSRYPDHMKQHDFFKSAMPEGYVQERTIFYKDDGNYKTRAEVKFEGDTLVNRIELKGIDFKEDGNILGHKMEYNYNSHNVYIMADKPKNGIKVNFKIRHNIKDGSVQLADHYQQNTPIGDGPVLLPDNHYLSTQSALSKDPNEKRDHMILLEFVTAAGITHGMDELYK

SEQ ID NO: 104 - protein, 543 aa, Artificial Sequence
  CD37-TLR3Zloop-scFv15
MSAQESCLSLIKYFLFVFNLFFFVLGSLIFCFGIWILIDKTSFVSFVGLAFVPLQIWSKVLAISGIFTMGIALLGCVGALKELRCLLGLYFGMLLLLFATQITLGILISTQRAQLERSLRDVVEKTIQKYGTNPEETAAEESWDYVQFQLRCCGWHYPQDWFQVLILRGNGSEAHRVPCSCYNLSATNDSTILDKVILPQLSRLGHLARSRHSADICAVPAESHIYREGCAQGLQKWLHNNLISIVGICLGVGLLELGFMTLSIFLCRNLDHVYNRLARYRSFTKQSISLASLPKDIQMTQSPSSLSASVGDRVTITCRASQSIGLYLAWYQQKPGKAPKLLIYAASSLQSGVPSRFSGSGSGTDFTLTISSLQPEDFATYYCQQGNTLSYTFGQGTKVEIKRTVAGGSGGSGGSGGSEVQLVQSGAEVKKPGESLKISCKGSGYSFTNYWVGWVRQMPGKGLEWMGFIDPSDSYTNYAPSFQGQVTISADKSISTAYLQWSSLKASDTAMYYCARELYQGYMDTFDSWGQGTLVTVSSASTK

SEQ ID NO: 105 - protein, 781 aa, Artificial Sequence
  CD37-TLR3Zloop-GFP2-scFv15
MSAQESCLSLIKYFLFVFNLFFFVLGSLIFCFGIWILIDKTSFVSFVGLAFVPLQIWSKVLAISGIFTMGIALLGCVGALKELRCLLGLYFGMLLLLFATQITLGILISTQRAQLERSLRDVVEKTIQKYGTNPEETAAEESWDYVQFQLRCCGWHYPQDWFQVLILRGNGSEAHRVPCSCYNLSATNDSTILDKVILPQLSRLGHLARSRHSADICAVPAESHIYREGCAQGLQKWLHNNLISIVGICLGVGLLELGFMTLSIFLCRNLDHVYNRLARYRSFTKQSISLASLPKMSKGEELFTGVVPILVELDGDVNGQKFSVSGEGEGDATYGKLTLKFICTTGKLPVPWPTLVTTLSYGVQCFSRYPDHMKQHDFFKSAMPEGYVQERTIFYKDDGNYKTRAEVKFEGDTLVNRIELKGIDFKEDGNILGHKMEYNYNSHNVYIMADKPKNGIKVNFKIRHNIKDGSVQLADHYQQNTPIGDGPVLLPDNHYLSTQSALSKDPNEKRDHMILLEFVTAAGITHGMDELYKDIQMTQSPSSLSASVGDRVTITCRASQSIGLYLAWYQQKPGKAPKLLIYAASSLQSGVPSRFSGSGSGTDFTLTISSLQPEDFATYYCQQGNTLSYTFGQGTKVEIKRTVAGGSGGSGGSGGSEVQLVQSGAEVKKPGESLKISCKGSGYSFTNYWVGWVRQMPGKGLEWMGFIDPSDSYTNYAPSFQGQVTISADKSISTAYLQWSSLKASDTAMYYCARELYQGYMDTFDSWGQGTLVTVSSASTK

SEQ ID NO: 106 - protein, 1052 aa, Artificial Sequence
  TLR3signal-scFv15-EYFP-TLR3Zloop-CD37-GFP2
MRQTLPCIYFWGGLLPFGMLCASDIQMTQSPSSLSASVGDRVTITCRASQSIGLYLAWYQQKPGKAPKLLIYAASSLQSGVPSRFSGSGSGTDFTLTISSLQPEDFATYYCQQGNTLSYTFGQGTKVEIKRTVAGGSGGSGGSGGSEVQLVQSGAEVKKPGESLKISCKGSGYSFTNYWVGWVRQMPGKGLEWMGFIDPSDSYTNYAPSFQGQVTISADKSISTAYLQWSSLKASDTAMYYCARELYQGYMDTFDSWGQGTLVTVSSASTKMVSKGEELFTGVVPILVELDGDVNGHKFSVSGEGEGDATYGKLTLKFICTTGKLPVPWPTLVTTFGYGLQCFARYPDHMKQHDFFKSAMPEGYVQERTIFFKDDGNYKTRAEVKFEGDTLVNRIELKGIDFKEDGNILGHKLEYNYNSHNVYIMADKQKNGIKVNFKIRHNIEDGSVQLADHYQQNTPIGDGPVLLPDNHYLSYQSALSKDPNEKRDHMVLLEFVTAAGITLGMDELYKSGLRSTGSRSFTKQSISLASLPKMSAQESCLSLIKYFLFVFNLFFFVLGSLIFCFGIWILIDKTSFVSFVGLAFVPLQIWSKVLAISGIFTMGIALLGCVGALKELRCLLGLYFGMLLLLFATQITLGILISTQRAQLERSLRDVVEKTIQKYGTNPEETAAEESWDYVQFQLRCCGWHYPQDWFQVLILRGNGSEAHRVPCSCYNLSATNDSTILDKVILPQLSRLGHLARSRHSADICAVPAESHIYREGCAQGLQKWLHNNLISIVGICLGVGLLELGFMTLSIFLCRNLDHVYNRLARYRMSKGEELFTGVVPILVELDGDVNGQKFSVSGEGEGDATYGKLTLKFICTTGKLPVPWPTLVTTLSYGVQCFSRYPDHMKQHDFFKSAMPEGYVQERTIFYKDDGNYKTRAEVKFEGDTLVNRIELKGIDFKEDGNILGHKMEYNYNSHNVYIMADKPKNGIKVNFKIRHNIKDGSVQLADHYQQNTPIGDGPVLLPDNHYLSTQSALSKDPNEKRDHMILLEFVTAAGITHGMDELYK

SEQ ID NO: 107 - protein, 566 aa, Artificial Sequence
  TLR3signal-scFv15-TLR3Zloop-CD37
MRQTLPCIYFWGGLLPFGMLCASDIQMTQSPSSLSASVGDRVTITCRASQSIGLYLAWYQQKPGKAPKLLIYAASSLQSGVPSRFSGSGSGTDFTLTISSLQPEDFATYYCQQGNTLSYTFGQGTKVEIKRTVAGGSGGSGGSGGSEVQLVQSGAEVKKPGESLKISCKGSGYSFTNYWVGWVRQMPGKGLEWMGFIDPSDSYTNYAPSFQGQVTISADKSISTAYLQWSSLKASDTAMYYCARELYQGYMDTFDSWGQGTLVTVSSASTKSFTKQSISLASLPKMSAQESCLSLIKYFLFVFNLFFFVLGSLIFCFGIWILIDKTSFVSFVGLAFVPLQIWSKVLAISGIFTMGIALLGCVGALKELRCLLGLYFGMLLLLFATQITLGILISTQRAQLERSLRDVVEKTIQKYGTNPEETAAEESWDYVQFQLRCCGWHYPQDWFQVLILRGNGSEAHRVPCSCYNLSATNDSTILDKVILPQLSRLGHLARSRHSADICAVPAESHIYREGCAQGLQKWLHNNLISIVGICLGVGLLELGFMTLSIFLCRNLDHVYNRLARYR

SEQ ID NO: 108 - protein, 546 aa, Artificial Sequence
  CD37-TLR3Zloop-scFv12
MSAQESCLSLIKYFLFVFNLFFFVLGSLIFCFGIWILIDKTSFVSFVGLAFVPLQIWSKVLAISGIFTMGIALLGCVGALKELRCLLGLYFGMLLLLFATQITLGILISTQRAQLERSLRDVVEKTIQKYGTNPEETAAEESWDYVQFQLRCCGWHYPQDWFQVLILRGNGSEAHRVPCSCYNLSATNDSTILDKVILPQLSRLGHLARSRHSADICAVPAESHIYREGCAQGLQKWLHNNLISIVGICLGVGLLELGFMTLSIFLCRNLDHVYNRLARYRSFTKQSISLASLPKQSVLTQPPSVSVAPGQTARISCSGDNIGSYYVHWYQQKPGQAPVLVIYEDSERPSGIPERFSGSNSGNTATLTISGTQAEDEADYYCSSYDDPNFQVFGGGTKLTVLGQPKAAGGSGGSGGSGGSQVQLQQSGPGLVKPSQTLSLTCAISGDSVSSNSAAWGWIRQSPGRGLEWLGIIQKRSKWYNNYAVSVKSRITINPDTSKNQFSLQLNSVTPEDTAVYYCARYSYPFYSIDYWGQGTLVTVSSASTK

SEQ ID NO: 109 - protein, 784 aa, Artificial Sequence
  CD37-TLR3Zloop-GFP2-scFv12
MSAQESCLSLIKYFLFVFNLFFFVLGSLIFCFGIWILIDKTSFVSFVGLAFVPLQIWSKVLAISGIFTMGIALLGCVGALKELRCLLGLYFGMLLLLFATQITLGILISTQRAQLERSLRDVVEKTIQKYGTNPEETAAEESWDYVQFQLRCCGWHYPQDWFQVLILRGNGSEAHRVPCSCYNLSATNDSTILDKVILPQLSRLGHLARSRHSADICAVPAESHIYREGCAQGLQKWLHNNLISIVGICLGVGLLELGFMTLSIFLCRNLDHVYNRLARYRSFTKQSISLASLPKMSKGEELFTGVVPILVELDGDVNGQKFSVSGEGEGDATYGKLTLKFICTTGKLPVPWPTLVTTLSYGVQCFSRYPDHMKQHDFFKSAMPEGYVQERTIFYKDDGNYKTRAEVKFEGDTLVNRIELKGIDFKEDGNILGHKMEYNYNSHNVYIMADKPKNGIKVNFKIRHNIKDGSVQLADHYQQNTPIGDGPVLLPDNHYLSTQSALSKDPNEKRDHMILLEFVTAAGITHGMDELYKQSVLTQPPSVSVAPGQTARISCSGDNIGSYYVHWYQQKPGQAPVLVIYEDSERPSGIPERFSGSNSGNTATLTISGTQAEDEADYYCSSYDDPNFQVFGGGTKLTVLGQPKAAGGSGGSGGSGGSQVQLQQSGPGLVKPSQTLSLTCAISGDSVSSNSAAWGWIRQSPGRGLEWLGIIQKRSKWYNNYAVSVKSRITINPDTSKNQFSLQLNSVTPEDTAVYYCARYSYPFYSIDYWGQGTLVTVSSASTK

SEQ ID NO: 110 - protein, 1055 aa, Artificial Sequence
  TLR3signal-scFv12-EYFP-TLR3Zloop-CD37-GFP2
MRQTLPCIYFWGGLLPFGMLCASQSVLTQPPSVSVAPGQTARISCSGDNIGSYYVHWYQQKPGQAPVLVIYEDSERPSGIPERFSGSNSGNTATLTISGTQAEDEADYYCSSYDDPNFQVFGGGTKLTVLGQPKAAGGSGGSGGSGGSQVQLQQSGPGLVKPSQTLSLTCAISGDSVSSNSAAWGWIRQSPGRGLEWLGIIQKRSKWYNNYAVSVKSRITINPDTSKNQFSLQLNSVTPEDTAVYYCARYSYPFYSIDYWGQGTLVTVSSASTKMVSKGEELFTGVVPILVELDGDVNGHKFSVSGEGEGDATYGKLTLKFICTTGKLPVPWPTLVTTFGYGLQCFARYPDHMKQHDFFKSAMPEGYVQERTIFFKDDGNYKTRAEVKFEGDTLVNRIELKGIDFKEDGNILGHKLEYNYNSHNVYIMADKQKNGIKVNFKIRHNIEDGSVQLADHYQQNTPIGDGPVLLPDNHYLSYQSALSKDPNEKRDHMVLLEFVTAAGITLGMDELYKSGLRSTGSRSFTKQSISLASLPKMSAQESCLSLIKYFLFVFNLFFFVLGSLIFCFGIWILIDKTSFVSFVGLAFVPLQIWSKVLAISGIFTMGIALLGCVGALKELRCLLGLYFGMLLLLFATQITLGILISTQRAQLERSLRDVVEKTIQKYGTNPEETAAEESWDYVQFQLRCCGWHYPQDWFQVLILRGNGSEAHRVPCSCYNLSATNDSTILDKVILPQLSRLGHLARSRHSADICAVPAESHIYREGCAQGLQKWLHNNLISIVGICLGVGLLELGFMTLSIFLCRNLDHVYNRLARYRMSKGEELFTGVVPILVELDGDVNGQKFSVSGEGEGDATYGKLTLKFICTTGKLPVPWPTLVTTLSYGVQCFSRYPDHMKQHDFFKSAMPEGYVQERTIFYKDDGNYKTRAEVKFEGDTLVNRIELKGIDFKEDGNILGHKMEYNYNSHNVYIMADKPKNGIKVNFKIRHNIKDGSVQLADHYQQNTPIGDGPVLLPDNHYLSTQSALSKDPNEKRDHMILLEFVTAAGITHGMDELYK

SEQ ID NO: 111 - protein, 569 aa, Artificial Sequence
  TLR3signal-scFv12-TLR3Zloop-CD37
MRQTLPCIYFWGGLLPFGMLCASQSVLTQPPSVSVAPGQTARISCSGDNIGSYYVHWYQQKPGQAPVLVIYEDSERPSGIPERFSGSNSGNTATLTISGTQAEDEADYYCSSYDDPNFQVFGGGTKLTVLGQPKAAGGSGGSGGSGGSQVQLQQSGPGLVKPSQTLSLTCAISGDSVSSNSAAWGWIRQSPGRGLEWLGIIQKRSKWYNNYAVSVKSRITINPDTSKNQFSLQLNSVTPEDTAVYYCARYSYPFYSIDYWGQGTLVTVSSASTKSFTKQSISLASLPKMSAQESCLSLIKYFLFVFNLFFFVLGSLIFCFGIWILIDKTSFVSFVGLAFVPLQIWSKVLAISGIFTMGIALLGCVGALKELRCLLGLYFGMLLLLFATQITLGILISTQRAQLERSLRDVVEKTIQKYGTNPEETAAEESWDYVQFQLRCCGWHYPQDWFQVLILRGNGSEAHRVPCSCYNLSATNDSTILDKVILPQLSRLGHLARSRHSADICAVPAESHIYREGCAQGLQKWLHNNLISIVGICLGVGLLELGFMTLSIFLCRNLDHVYNRLARYR

SEQ ID NO: 112 - protein, 543 aa, Artificial Sequence
  CD37-TLR3Zloop-scFv1068
MSAQESCLSLIKYFLFVFNLFFFVLGSLIFCFGIWILIDKTSFVSFVGLAFVPLQIWSKVLAISGIFTMGIALLGCVGALKELRCLLGLYFGMLLLLFATQITLGILISTQRAQLERSLRDVVEKTIQKYGTNPEETAAEESWDYVQFQLRCCGWHYPQDWFQVLILRGNGSEAHRVPCSCYNLSATNDSTILDKVILPQLSRLGHLARSRHSADICAVPAESHIYREGCAQGLQKWLHNNLISIVGICLGVGLLELGFMTLSIFLCRNLDHVYNRLARYRSFTKQSISLASLPKDIQMTQSPASLSASVGETVTITCRASGNIHNYLAWYQQKQGKSPQLLVYNAKTLADGVPSRFSGSESGTQYSLKINSLQPEDFGSYYCQHFWSTPFTFGSGTKLELKRGTVAAGGSGGSGGSGGSQVQLQQPGAELVQPGTSVRLSCKASGYIFTTYWIHWVKQRPGQGLEWIGEINPNNGRINYNEKFKTKATLTVDKSSSTAYMQLSSLTSEDSAVYYCTRVGVMITTFPYWGQGTLVTVSAASTK

SEQ ID NO: 113 - protein, 781 aa, Artificial Sequence
  CD37-TLR3Zloop-GFP2-scFv1068
MSAQESCLSLIKYFLFVFNLFFFVLGSLIFCFGIWILIDKTSFVSFVGLAFVPLQIWSKVLAISGIFTMGIALLGCVGALKELRCLLGLYFGMLLLLFATQITLGILISTQRAQLERSLRDVVEKTIQKYGTNPEETAAEESWDYVQFQLRCCGWHYPQDWFQVLILRGNGSEAHRVPCSCYNLSATNDSTILDKVILPQLSRLGHLARSRHSADICAVPAESHIYREGCAQGLQKWLHNNLISIVGICLGVGLLELGFMTLSIFLCRNLDHVYNRLARYRSFTKQSISLASLPKMSKGEELFTGVVPILVELDGDVNGQKFSVSGEGEGDATYGKLTLKFICTTGKLPVPWPTLVTTLSYGVQCFSRYPDHMKQHDFFKSAMPEGYVQERTIFYKDDGNYKTRAEVKFEGDTLVNRIELKGIDFKEDGNILGHKMEYNYNSHNVYIMADKPKNGIKVNFKIRHNIKDGSVQLADHYQQNTPIGDGPVLLPDNHYLSTQSALSKDPNEKRDHMILLEFVTAAGITHGMDELYKDIQMTQSPASLSASVGETVTITCRASGNIHNYLAWYQQKQGKSPQLLVYNAKTLADGVPSRFSGSESGTQYSLKINSLQPEDFGSYYCQHFWSTPFTFGSGTKLELKRGTVAAGGSGGSGGSGGSQVQLQQPGAELVQPGTSVRLSCKASGYIFTTYWIHWVKQRPGQGLEWIGEINPNNGRINYNEKFKTKATLTVDKSSSTAYMQLSSLTSEDSAVYYCTRVGVMITTFPYWGQGTLVTVSAASTK

SEQ ID NO: 114 - protein, 1052 aa, Artificial Sequence
  TLR3signal-scFv1068-EYFP-TLR3Zloop-CD37-GFP2
MRQTLPCIYFWGGLLPFGMLCASDIQMTQSPASLSASVGETVTITCRASGNIHNYLAWYQQKQGKSPQLLVYNAKTLADGVPSRFSGSESGTQYSLKINSLQPEDFGSYYCQHFWSTPFTFGSGTKLELKRGTVAAGGSGGSGGSGGSQVQLQQPGAELVQPGTSVRLSCKASGYIFTTYWIHWVKQRPGQGLEWIGEINPNNGRINYNEKFKTKATLTVDKSSSTAYMQLSSLTSEDSAVYYCTRVGVMITTFPYWGQGTLVTVSAASTKMVSKGEELFTGVVPILVELDGDVNGHKFSVSGEGEGDATYGKLTLKFICTTGKLPVPWPTLVTTFGYGLQCFARYPDHMKQHDFFKSAMPEGYVQERTIFFKDDGNYKTRAEVKFEGDTLVNRIELKGIDFKEDGNILGHKLEYNYNSHNVYIMADKQKNGIKVNFKIRHNIEDGSVQLADHYQQNTPIGDGPVLLPDNHYLSYQSALSKDPNEKRDHMVLLEFVTAAGITLGMDELYKSGLRSTGSRSFTKQSISLASLPKMSAQESCLSLIKYFLFVFNLFFFVLGSLIFCFGIWILIDKTSFVSFVGLAFVPLQIWSKVLAISGIFTMGIALLGCVGALKELRCLLGLYFGMLLLLFATQITLGILISTQRAQLERSLRDVVEKTIQKYGTNPEETAAEESWDYVQFQLRCCGWHYPQDWFQVLILRGNGSEAHRVPCSCYNLSATNDSTILDKVILPQLSRLGHLARSRHSADICAVPAESHIYREGCAQGLQKWLHNNLISIVGICLGVGLLELGFMTLSIFLCRNLDHVYNRLARYRMSKGEELFTGVVPILVELDGDVNGQKFSVSGEGEGDATYGKLTLKFICTTGKLPVPWPTLVTTLSYGVQCFSRYPDHMKQHDFFKSAMPEGYVQERTIFYKDDGNYKTRAEVKFEGDTLVNRIELKGIDFKEDGNILGHKMEYNYNSHNVYIMADKPKNGIKVNFKIRHNIKDGSVQLADHYQQNTPIGDGPVLLPDNHYLSTQSALSKDPNEKRDHMILLEFVTAAGITHGMDELYK

SEQ ID NO: 115 - protein, 566 aa, Artificial Sequence
  TLR3signal-scFv1068-TLR3Zloop-CD37
MRQTLPCIYFWGGLLPFGMLCASDIQMTQSPASLSASVGETVTITCRASGNIHNYLAWYQQKQGKSPQLLVYNAKTLADGVPSRFSGSESGTQYSLKINSLQPEDFGSYYCQHFWSTPFTFGSGTKLELKRGTVAAGGSGGSGGSGGSQVQLQQPGAELVQPGTSVRLSCKASGYIFTTYWIHWVKQRPGQGLEWIGEINPNNGRINYNEKFKTKATLTVDKSSSTAYMQLSSLTSEDSAVYYCTRVGVMITTFPYWGQGTLVTVSAASTKSFTKQSISLASLPKMSAQESCLSLIKYFLFVFNLFFFVLGSLIFCFGIWILIDKTSFVSFVGLAFVPLQIWSKVLAISGIFTMGIALLGCVGALKELRCLLGLYFGMLLLLFATQITLGILISTQRAQLERSLRDVVEKTIQKYGTNPEETAAEESWDYVQFQLRCCGWHYPQDWFQVLILRGNGSEAHRVPCSCYNLSATNDSTILDKVILPQLSRLGHLARSRHSADICAVPAESHIYREGCAQGLQKWLHNNLISIVGICLGVGLLELGFMTLSIFLCRNLDHVYNRLARYR

SEQ ID NO: 116 - protein, 517 aa, Artificial Sequence
  CD53-TLR7Zloop-GFP2
MGMSSLKLLKYVLFFFNLLFWICGCCILGFGIYLLIHNNFGVLFHNLPSLTLGNVFVIVGSIIMVVAFLGCMGSIKENKCLLMSFFILLLIILLAEVTLAILLFVYEQKLNEYVAKGLTDSIHRYHSDNSTKAAWDSIQSFLQCCGINGTSDWTSGPPASCPSDRKVEGCYAKARLWFHSNFLYIGIITICVCVIEVLGMSFALTLNCQIDKTSQTIGLNKISPSGDSSEVGFCSNARTSVESYEPQVLEQLHYFRYDKYARSCRFKNKEASFMSVNESMSKGEELFTGVVPILVELDGDVNGQKFSVSGEGEGDATYGKLTLKFICTTGKLPVPWPTLVTTLSYGVQCFSRYPDHMKQHDFFKSAMPEGYVQERTIFYKDDGNYKTRAEVKFEGDTLVNRIELKGIDFKEDGNILGHKMEYNYNSHNVYIMADKPKNGIKVNFKIRHNIKDGSVQLADHYQQNTPIGDGPVLLPDNHYLSTQSALSKDPNEKRDHMILLEFVTAAGITHGMDELYK

SEQ ID NO: 117 - protein, 791 aa, Artificial Sequence
  TLR7signal-EYFP-CD53-TLR7Zloop-GFP2
MVFPMWTLKRQILILFNIILISKLLGMVSKGEELFTGVVPILVELDGDVNGHKFSVSGEGEGDATYGKLTLKFICTTGKLPVPWPTLVTTFGYGLQCFARYPDHMKQHDFFKSAMPEGYVQERTIFFKDDGNYKTRAEVKFEGDTLVNRIELKGIDFKEDGNILGHKLEYNYNSHNVYIMADKQKNGIKVNFKIRHNIEDGSVQLADHYQQNTPIGDGPVLLPDNHYLSYQSALSKDPNEKRDHMVLLEFVTAAGITLGMDELYKSGLRSTGSRMGMSSLKLLKYVLFFFNLLFWICGCCILGFGIYLLIHNNFGVLFHNLPSLTLGNVFVIVGSIIMVVAFLGCMGSIKENKCLLMSFFILLLIILLAEVTLAILLFVYEQKLNEYVAKGLTDSIHRYHSDNSTKAAWDSIQSFLQCCGINGTSDWTSGPPASCPSDRKVEGCYAKARLWFHSNFLYIGIITICVCVIEVLGMSFALTLNCQIDKTSQTIGLNKISPSGDSSEVGFCSNARTSVESYEPQVLEQLHYFRYDKYARSCRFKNKEASFMSVNESMSKGEELFTGVVPILVELDGDVNGQKFSVSGEGEGDATYGKLTLKFICTTGKLPVPWPTLVTTLSYGVQCFSRYPDHMKQHDFFKSAMPEGYVQERTIFYKDDGNYKTRAEVKFEGDTLVNRIELKGIDFKEDGNILGHKMEYNYNSHNVYIMADKPKNGIKVNFKIRHNIKDGSVQLADHYQQNTPIGDGPVLLPDNHYLSTQSALSKDPNEKRDHMILLEFVTAAGITHGMDELYK

SEQ ID NO: 118 - protein, 791 aa, Artificial Sequence
  TLR7signal-EYFP-TLR7Zloop-CD53-GFP2
MVFPMWTLKRQILILFNIILISKLLGMVSKGEELFTGVVPILVELDGDVNGHKFSVSGEGEGDATYGKLTLKFICTTGKLPVPWPTLVTTFGYGLQCFARYPDHMKQHDFFKSAMPEGYVQERTIFFKDDGNYKTRAEVKFEGDTLVNRIELKGIDFKEDGNILGHKLEYNYNSHNVYIMADKQKNGIKVNFKIRHNIEDGSVQLADHYQQNTPIGDGPVLLPDNHYLSYQSALSKDPNEKRDHMVLLEFVTAAGITLGMDELYKSGLRSTGSRNKISPSGDSSEVGFCSNARTSVESYEPQVLEQLHYFRYDKYARSCRFKNKEASFMSVNESMGMSSLKLLKYVLFFFNLLFWICGCCILGFGIYLLIHNNFGVLFHNLPSLTLGNVFVIVGSIIMVVAFLGCMGSIKENKCLLMSFFILLLIILLAEVTLAILLFVYEQKLNEYVAKGLTDSIHRYHSDNSTKAAWDSIQSFLQCCGINGTSDWTSGPPASCPSDRKVEGCYAKARLWFHSNFLYIGIITICVCVIEVLGMSFALTLNCQIDKTSQTIGLMSKGEELFTGVVPILVELDGDVNGQKFSVSGEGEGDATYGKLTLKFICTTGKLPVPWPTLVTTLSYGVQCFSRYPDHMKQHDFFKSAMPEGYVQERTIFYKDDGNYKTRAEVKFEGDTLVNRIELKGIDFKEDGNILGHKMEYNYNSHNVYIMADKPKNGIKVNFKIRHNIKDGSVQLADHYQQNTPIGDGPVLLPDNHYLSTQSALSKDPNEKRDHMILLEFVTAAGITHGMDELYK

SEQ ID NO: 119 - protein, 508 aa, Artificial Sequence
  CD53-TLR8Zloop-GFP2
MGMSSLKLLKYVLFFFNLLFWICGCCILGFGIYLLIHNNFGVLFHNLPSLTLGNVFVIVGSIIMVVAFLGCMGSIKENKCLLMSFFILLLIILLAEVTLAILLFVYEQKLNEYVAKGLTDSIHRYHSDNSTKAAWDSIQSFLQCCGINGTSDWTSGPPASCPSDRKVEGCYAKARLWFHSNFLYIGIITICVCVIEVLGMSFALTLNCQIDKTSQTIGLNRISPLVKDTRQSYANSSSFQRHIRKRRSTDFEFDPHSNFYHFTRPLIKPQMSKGEELFTGVVPILVELDGDVNGQKFSVSGEGEGDATYGKLTLKFICTTGKLPVPWPTLVTTLSYGVQCFSRYPDHMKQHDFFKSAMPEGYVQERTIFYKDDGNYKTRAEVKFEGDTLVNRIELKGIDFKEDGNILGHKMEYNYNSHNVYIMADKPKNGIKVNFKIRHNIKDGSVQLADHYQQNTPIGDGPVLLPDNHYLSTQSALSKDPNEKRDHMILLEFVTAAGITHGMDELYK

SEQ ID NO: 120 - protein, 782 aa, Artificial Sequence
  TLR8signal-EYFP-CD53-TLR8Zloop-GFP2
MENMFLQSSMLTCIFLLISGSCELCAMVSKGEELFTGVVPILVELDGDVNGHKFSVSGEGEGDATYGKLTLKFICTTGKLPVPWPTLVTTFGYGLQCFARYPDHMKQHDFFKSAMPEGYVQERTIFFKDDGNYKTRAEVKFEGDTLVNRIELKGIDFKEDGNILGHKLEYNYNSHNVYIMADKQKNGIKVNFKIRHNIEDGSVQLADHYQQNTPIGDGPVLLPDNHYLSYQSALSKDPNEKRDHMVLLEFVTAAGITLGMDELYKSGLRSTGSRMGMSSLKLLKYVLFFFNLLFWICGCCILGFGIYLLIHNNFGVLFHNLPSLTLGNVFVIVGSIIMVVAFLGCMGSIKENKCLLMSFFILLLIILLAEVTLAILLFVYEQKLNEYVAKGLTDSIHRYHSDNSTKAAWDSIQSFLQCCGINGTSDWTSGPPASCPSDRKVEGCYAKARLWFHSNFLYIGIITICVCVIEVLGMSFALTLNCQIDKTSQTIGLNRISPLVKDTRQSYANSSSFQRHIRKRRSTDFEFDPHSNFYHFTRPLIKPQMSKGEELFTGVVPILVELDGDVNGQKFSVSGEGEGDATYGKLTLKFICTTGKLPVPWPTLVTTLSYGVQCFSRYPDHMKQHDFFKSAMPEGYVQERTIFYKDDGNYKTRAEVKFEGDTLVNRIELKGIDFKEDGNILGHKMEYNYNSHNVYIMADKPKNGIKVNFKIRHNIKDGSVQLADHYQQNTPIGDGPVLLPDNHYLSTQSALSKDPNEKRDHMILLEFVTAAGITHGMDELYK

SEQ ID NO: 121 - protein, 782 aa, Artificial Sequence
  TLR8signal-EYFP-TLR8Zloop-CD53-GFP2
MENMFLQSSMLTCIFLLISGSCELCAMVSKGEELFTGVVPILVELDGDVNGHKFSVSGEGEGDATYGKLTLKFICTTGKLPVPWPTLVTTFGYGLQCFARYPDHMKQHDFFKSAMPEGYVQERTIFFKDDGNYKTRAEVKFEGDTLVNRIELKGIDFKEDGNILGHKLEYNYNSHNVYIMADKQKNGIKVNFKIRHNIEDGSVQLADHYQQNTPIGDGPVLLPDNHYLSYQSALSKDPNEKRDHMVLLEFVTAAGITLGMDELYKSGLRSTGSRNRISPLVKDTRQSYANSSSFQRHIRKRRSTDFEFDPHSNFYHFTRPLIKPQMGMSSLKLLKYVLFFFNLLFWICGCCILGFGIYLLIHNNFGVLFHNLPSLTLGNVFVIVGSIIMVVAFLGCMGSIKENKCLLMSFFILLLIILLAEVTLAILLFVYEQKLNEYVAKGLTDSIHRYHSDNSTKAAWDSIQSFLQCCGINGTSDWTSGPPASCPSDRKVEGCYAKARLWFHSNFLYIGIITICVCVIEVLGMSFALTLNCQIDKTSQTIGLMSKGEELFTGVVPILVELDGDVNGQKFSVSGEGEGDATYGKLTLKFICTTGKLPVPWPTLVTTLSYGVQCFSRYPDHMKQHDFFKSAMPEGYVQERTIFYKDDGNYKTRAEVKFEGDTLVNRIELKGIDFKEDGNILGHKMEYNYNSHNVYIMADKPKNGIKVNFKIRHNIKDGSVQLADHYQQNTPIGDGPVLLPDNHYLSTQSALSKDPNEKRDHMILLEFVTAAGITHGMDELYK

SEQ ID NO: 122 - protein, 502 aa, Artificial Sequence
  CD53-TLR9Zloop-GFP2
MGMSSLKLLKYVLFFFNLLFWICGCCILGFGIYLLIHNNFGVLFHNLPSLTLGNVFVIVGSIIMVVAFLGCMGSIKENKCLLMSFFILLLIILLAEVTLAILLFVYEQKLNEYVAKGLTDSIHRYHSDNSTKAAWDSIQSFLQCCGINGTSDWTSGPPASCPSDRKVEGCYAKARLWFHSNFLYIGIITICVCVIEVLGMSFALTLNCQIDKTSQTIGLNRISGASELTATMGEADGGEKVWLQPGDLAPAPVDTPSSEDFRPNMSKGEELFTGVVPILVELDGDVNGQKFSVSGEGEGDATYGKLTLKFICTTGKLPVPWPTLVTTLSYGVQCFSRYPDHMKQHDFFKSAMPEGYVQERTIFYKDDGNYKTRAEVKFEGDTLVNRIELKGIDFKEDGNILGHKMEYNYNSHNVYIMADKPKNGIKVNFKIRHNIKDGSVQLADHYQQNTPIGDGPVLLPDNHYLSTQSALSKDPNEKRDHMILLEFVTAAGITHGMDELYK

SEQ ID NO: 123 - protein, 775 aa, Artificial Sequence
  TLR9signal-EYFP-CD53-TLR9Zloop-GFP2
MGFCRSALHPLSLLVQAIMLAMTLAMVSKGEELFTGVVPILVELDGDVNGHKFSVSGEGEGDATYGKLTLKFICTTGKLPVPWPTLVTTFGYGLQCFARYPDHMKQHDFFKSAMPEGYVQERTIFFKDDGNYKTRAEVKFEGDTLVNRIELKGIDFKEDGNILGHKLEYNYNSHNVYIMADKQKNGIKVNFKIRHNIEDGSVQLADHYQQNTPIGDGPVLLPDNHYLSYQSALSKDPNEKRDHMVLLEFVTAAGITLGMDELYKSGLRSTGSRMGMSSLKLLKYVLFFFNLLFWICGCCILGFGIYLLIHNNFGVLFHNLPSLTLGNVFVIVGSIIMVVAFLGCMGSIKENKCLLMSFFILLLIILLAEVTLAILLFVYEQKLNEYVAKGLTDSIHRYHSDNSTKAAWDSIQSFLQCCGINGTSDWTSGPPASCPSDRKVEGCYAKARLWFHSNFLYIGIITICVCVIEVLGMSFALTLNCQIDKTSQTIGLNRISGASELTATMGEADGGEKVWLQPGDLAPAPVDTPSSEDFRPNMSKGEELFTGVVPILVELDGDVNGQKFSVSGEGEGDATYGKLTLKFICTTGKLPVPWPTLVTTLSYGVQCFSRYPDHMKQHDFFKSAMPEGYVQERTIFYKDDGNYKTRAEVKFEGDTLVNRIELKGIDFKEDGNILGHKMEYNYNSHNVYIMADKPKNGIKVNFKIRHNIKDGSVQLADHYQQNTPIGDGPVLLPDNHYLSTQSALSKDPNEKRDHMILLEFVTAAGITHGMDELYK

SEQ ID NO: 124 - protein, 775 aa, Artificial Sequence
  TLR9signal-EYFP-TLR9Zloop-CD53-GFP2
MGFCRSALHPLSLLVQAIMLAMTLAMVSKGEELFTGVVPILVELDGDVNGHKFSVSGEGEGDATYGKLTLKFICTTGKLPVPWPTLVTTFGYGLQCFARYPDHMKQHDFFKSAMPEGYVQERTIFFKDDGNYKTRAEVKFEGDTLVNRIELKGIDFKEDGNILGHKLEYNYNSHNVYIMADKQKNGIKVNFKIRHNIEDGSVQLADHYQQNTPIGDGPVLLPDNHYLSYQSALSKDPNEKRDHMVLLEFVTAAGITLGMDELYKSGLRSTGSRNRISGASELTATMGEADGGEKVWLQPGDLAPAPVDTPSSEDFRPNMGMSSLKLLKYVLFFFNLLFWICGCCILGFGIYLLIHNNFGVLFHNLPSLTLGNVFVIVGSIIMVVAFLGCMGSIKENKCLLMSFFILLLIILLAEVTLAILLFVYEQKLNEYVAKGLTDSIHRYHSDNSTKAAWDSIQSFLQCCGINGTSDWTSGPPASCPSDRKVEGCYAKARLWFHSNFLYIGIITICVCVIEVLGMSFALTLNCQIDKTSQTIGLMSKGEELFTGVVPILVELDGDVNGQKFSVSGEGEGDATYGKLTLKFICTTGKLPVPWPTLVTTLSYGVQCFSRYPDHMKQHDFFKSAMPEGYVQERTIFYKDDGNYKTRAEVKFEGDTLVNRIELKGIDFKEDGNILGHKMEYNYNSHNVYIMADKPKNGIKVNFKIRHNIKDGSVQLADHYQQNTPIGDGPVLLPDNHYLSTQSALSKDPNEKRDHMILLEFVTAAGITHGMDELYK

SEQ ID NO: 125 - protein, 471 aa, Artificial Sequence
  CD53-TLR3Zloop-GFP2
MGMSSLKLLKYVLFFFNLLFWICGCCILGFGIYLLIHNNFGVLFHNLPSLTLGNVFVIVGSIIMVVAFLGCMGSIKENKCLLMSFFILLLIILLAEVTLAILLFVYEQKLNEYVAKGLTDSIHRYHSDNSTKAAWDSIQSFLQCCGINGTSDWTSGPPASCPSDRKVEGCYAKARLWFHSNFLYIGIITICVCVIEVLGMSFALTLNCQIDKTSQTIGLSFTKQSISLASLPKMSKGEELFTGVVPILVELDGDVNGQKFSVSGEGEGDATYGKLTLKFICTTGKLPVPWPTLVTTLSYGVQCFSRYPDHMKQHDFFKSAMPEGYVQERTIFYKDDGNYKTRAEVKFEGDTLVNRIELKGIDFKEDGNILGHKMEYNYNSHNVYIMADKPKNGIKVNFKIRHNIKDGSVQLADHYQQNTPIGDGPVLLPDNHYLSTQSALSKDPNEKRDHMILLEFVTAAGITHGMDELYK

SEQ ID NO: 126 - protein, 742 aa, Artificial Sequence
  TLR3signal-EYFP-TLR3Zloop-CD53-GFP2
MRQTLPCIYFWGGLLPFGMLCASMVSKGEELFTGVVPILVELDGDVNGHKFSVSGEGEGDATYGKLTLKFICTTGKLPVPWPTLVTTFGYGLQCFARYPDHMKQHDFFKSAMPEGYVQERTIFFKDDGNYKTRAEVKFEGDTLVNRIELKGIDFKEDGNILGHKLEYNYNSHNVYIMADKQKNGIKVNFKIRHNIEDGSVQLADHYQQNTPIGDGPVLLPDNHYLSYQSALSKDPNEKRDHMVLLEFVTAAGITLGMDELYKSGLRSTGSRSFTKQSISLASLPKMGMSSLKLLKYVLFFFNLLFWICGCCILGFGIYLLIHNNFGVLFHNLPSLTLGNVFVIVGSIIMVVAFLGCMGSIKENKCLLMSFFILLLIILLAEVTLAILLFVYEQKLNEYVAKGLTDSIHRYHSDNSTKAAWDSIQSFLQCCGINGTSDWTSGPPASCPSDRKVEGCYAKARLWFHSNFLYIGIITICVCVIEVLGMSFALTLNCQIDKTSQTIGLMSKGEELFTGVVPILVELDGDVNGQKFSVSGEGEGDATYGKLTLKFICTTGKLPVPWPTLVTTLSYGVQCFSRYPDHMKQHDFFKSAMPEGYVQERTIFYKDDGNYKTRAEVKFEGDTLVNRIELKGIDFKEDGNILGHKMEYNYNSHNVYIMADKPKNGIKVNFKIRHNIKDGSVQLADHYQQNTPIGDGPVLLPDNHYLSTQSALSKDPNEKRDHMILLEFVTAAGITHGMDELYK

SEQ ID NO: 127 - protein, 481 aa, Artificial Sequence
  CD53-TLR3Zloop-scFv15
MGMSSLKLLKYVLFFFNLLFWICGCCILGFGIYLLIHNNFGVLFHNLPSLTLGNVFVIVGSIIMVVAFLGCMGSIKENKCLLMSFFILLLIILLAEVTLAILLFVYEQKLNEYVAKGLTDSIHRYHSDNSTKAAWDSIQSFLQCCGINGTSDWTSGPPASCPSDRKVEGCYAKARLWFHSNFLYIGIITICVCVIEVLGMSFALTLNCQIDKTSQTIGLSFTKQSISLASLPKDIQMTQSPSSLSASVGDRVTITCRASQSIGLYLAWYQQKPGKAPKLLIYAASSLQSGVPSRFSGSGSGTDFTLTISSLQPEDFATYYCQQGNTLSYTFGQGTKVEIKRTVAGGSGGSGGSGGSEVQLVQSGAEVKKPGESLKISCKGSGYSFTNYWVGWVRQMPGKGLEWMGFIDPSDSYTNYAPSFQGQVTISADKSISTAYLQWSSLKASDTAMYYCARELYQGYMDTFDSWGQGTLVTVSSASTK

SEQ ID NO: 128 - protein, 719 aa, Artificial Sequence
  CD53-TLR3Zloop-GFP2-scFv15
MGMSSLKLLKYVLFFFNLLFWICGCCILGFGIYLLIHNNFGVLFHNLPSLTLGNVFVIVGSIIMVVAFLGCMGSIKENKCLLMSFFILLLIILLAEVTLAILLFVYEQKLNEYVAKGLTDSIHRYHSDNSTKAAWDSIQSFLQCCGINGTSDWTSGPPASCPSDRKVEGCYAKARLWFHSNFLYIGIITICVCVIEVLGMSFALTLNCQIDKTSQTIGLSFTKQSISLASLPKMSKGEELFTGVVPILVELDGDVNGQKFSVSGEGEGDATYGKLTLKFICTTGKLPVPWPTLVTTLSYGVQCFSRYPDHMKQHDFFKSAMPEGYVQERTIFYKDDGNYKTRAEVKFEGDTLVNRIELKGIDFKEDGNILGHKMEYNYNSHNVYIMADKPKNGIKVNFKIRHNIKDGSVQLADHYQQNTPIGDGPVLLPDNHYLSTQSALSKDPNEKRDHMILLEFVTAAGITHGMDELYKDIQMTQSPSSLSASVGDRVTITCRASQSIGLYLAWYQQKPGKAPKLLIYAASSLQSGVPSRFSGSGSGTDFTLTISSLQPEDFATYYCQQGNTLSYTFGQGTKVEIKRTVAGGSGGSGGSGGSEVQLVQSGAEVKKPGESLKISCKGSGYSFTNYWVGWVRQMPGKGLEWMGFIDPSDSYTNYAPSFQGQVTISADKSISTAYLQWSSLKASDTAMYYCARELYQGYMDTFDSWGQGTLVTVSSASTK

SEQ ID NO: 129 - protein, 990 aa, Artificial Sequence
  TLR3signal-scFv15-EYFP-TLR3Zloop-CD53-GFP2
MRQTLPCIYFWGGLLPFGMLCASDIQMTQSPSSLSASVGDRVTITCRASQSIGLYLAWYQQKPGKAPKLLIYAASSLQSGVPSRFSGSGSGTDFTLTISSLQPEDFATYYCQQGNTLSYTFGQGTKVEIKRTVAGGSGGSGGSGGSEVQLVQSGAEVKKPGESLKISCKGSGYSFTNYWVGWVRQMPGKGLEWMGFIDPSDSYTNYAPSFQGQVTISADKSISTAYLQWSSLKASDTAMYYCARELYQGYMDTFDSWGQGTLVTVSSASTKMVSKGEELFTGVVPILVELDGDVNGHKFSVSGEGEGDATYGKLTLKFICTTGKLPVPWPTLVTTFGYGLQCFARYPDHMKQHDFFKSAMPEGYVQERTIFFKDDGNYKTRAEVKFEGDTLVNRIELKGIDFKEDGNILGHKLEYNYNSHNVYIMADKQKNGIKVNFKIRHNIEDGSVQLADHYQQNTPIGDGPVLLPDNHYLSYQSALSKDPNEKRDHMVLLEFVTAAGITLGMDELYKSGLRSTGSRSFTKQSISLASLPKMGMSSLKLLKYVLFFFNLLFWICGCCILGFGIYLLIHNNFGVLFHNLPSLTLGNVFVIVGSIIMVVAFLGCMGSIKENKCLLMSFFILLLIILLAEVTLAILLFVYEQKLNEYVAKGLTDSIHRYHSDNSTKAAWDSIQSFLQCCGINGTSDWTSGPPASCPSDRKVEGCYAKARLWFHSNFLYIGIITICVCVIEVLGMSFALTLNCQIDKTSQTIGLMSKGEELFTGVVPILVELDGDVNGQKFSVSGEGEGDATYGKLTLKFICTTGKLPVPWPTLVTTLSYGVQCFSRYPDHMKQHDFFKSAMPEGYVQERTIFYKDDGNYKTRAEVKFEGDTLVNRIELKGIDFKEDGNILGHKMEYNYNSHNVYIMADKPKNGIKVNFKIRHNIKDGSVQLADHYQQNTPIGDGPVLLPDNHYLSTQSALSKDPNEKRDHMILLEFVTAAGITHGMDELYK

SEQ ID NO: 130 - protein, 504 aa, Artificial Sequence
  TLR3signal-scFv15-TLR3Zloop-CD53
MRQTLPCIYFWGGLLPFGMLCASDIQMTQSPSSLSASVGDRVTITCRASQSIGLYLAWYQQKPGKAPKLLIYAASSLQSGVPSRFSGSGSGTDFTLTISSLQPEDFATYYCQQGNTLSYTFGQGTKVEIKRTVAGGSGGSGGSGGSEVQLVQSGAEVKKPGESLKISCKGSGYSFTNYWVGWVRQMPGKGLEWMGFIDPSDSYTNYAPSFQGQVTISADKSISTAYLQWSSLKASDTAMYYCARELYQGYMDTFDSWGQGTLVTVSSASTKSFTKQSISLASLPKMGMSSLKLLKYVLFFFNLLFWICGCCILGFGIYLLIHNNFGVLFHNLPSLTLGNVFVIVGSIIMVVAFLGCMGSIKENKCLLMSFFILLLIILLAEVTLAILLFVYEQKLNEYVAKGLTDSIHRYHSDNSTKAAWDSIQSFLQCCGINGTSDWTSGPPASCPSDRKVEGCYAKARLWFHSNFLYIGIITICVCVIEVLGMSFALTLNCQIDKTSQTIGL

SEQ ID NO: 131 - protein, 484 aa, Artificial Sequence
  CD53-TLR3Zloop-scFv12
MGMSSLKLLKYVLFFFNLLFWICGCCILGFGIYLLIHNNFGVLFHNLPSLTLGNVFVIVGSIIMVVAFLGCMGSIKENKCLLMSFFILLLIILLAEVTLAILLFVYEQKLNEYVAKGLTDSIHRYHSDNSTKAAWDSIQSFLQCCGINGTSDWTSGPPASCPSDRKVEGCYAKARLWFHSNFLYIGIITICVCVIEVLGMSFALTLNCQIDKTSQTIGLSFTKQSISLASLPKQSVLTQPPSVSVAPGQTARISCSGDNIGSYYVHWYQQKPGQAPVLVIYEDSERPSGIPERFSGSNSGNTATLTISGTQAEDEADYYCSSYDDPNFQVFGGGTKLTVLGQPKAAGGSGGSGGSGGSQVQLQQSGPGLVKPSQTLSLTCAISGDSVSSNSAAWGWIRQSPGRGLEWLGIIQKRSKWYNNYAVSVKSRITINPDTSKNQFSLQLNSVTPEDTAVYYCARYSYPFYSIDYWGQGTLVTVSSASTK

SEQ ID NO: 132 - protein, 722 aa, Artificial Sequence
  CD53-TLR3Zloop-GFP2-scFv12
MGMSSLKLLKYVLFFFNLLFWICGCCILGFGIYLLIHNNFGVLFHNLPSLTLGNVFVIVGSIIMVVAFLGCMGSIKENKCLLMSFFILLLIILLAEVTLAILLFVYEQKLNEYVAKGLTDSIHRYHSDNSTKAAWDSIQSFLQCCGINGTSDWTSGPPASCPSDRKVEGCYAKARLWFHSNFLYIGIITICVCVIEVLGMSFALTLNCQIDKTSQTIGLSFTKQSISLASLPKMSKGEELFTGVVPILVELDGDVNGQKFSVSGEGEGDATYGKLTLKFICTTGKLPVPWPTLVTTLSYGVQCFSRYPDHMKQHDFFKSAMPEGYVQERTIFYKDDGNYKTRAEVKFEGDTLVNRIELKGIDFKEDGNILGHKMEYNYNSHNVYIMADKPKNGIKVNFKIRHNIKDGSVQLADHYQQNTPIGDGPVLLPDNHYLSTQSALSKDPNEKRDHMILLEFVTAAGITHGMDELYKQSVLTQPPSVSVAPGQTARISCSGDNIGSYYVHWYQQKPGQAPVLVIYEDSERPSGIPERFSGSNSGNTATLTISGTQAEDEADYYCSSYDDPNFQVFGGGTKLTVLGQPKAAGGSGGSGGSGGSQVQLQQSGPGLVKPSQTLSLTCAISGDSVSSNSAAWGWIRQSPGRGLEWLGIIQKRSKWYNNYAVSVKSRITINPDTSKNQFSLQLNSVTPEDTAVYYCARYSYPFYSIDYWGQGTLVTVSSASTK

SEQ ID NO: 133 - protein, 993 aa, Artificial Sequence
  TLR3signal-scFv12-EYFP-TLR3Zloop-CD53-GFP2
MRQTLPCIYFWGGLLPFGMLCASQSVLTQPPSVSVAPGQTARISCSGDNIGSYYVHWYQQKPGQAPVLVIYEDSERPSGIPERFSGSNSGNTATLTISGTQAEDEADYYCSSYDDPNFQVFGGGTKLTVLGQPKAAGGSGGSGGSGGSQVQLQQSGPGLVKPSQTLSLTCAISGDSVSSNSAAWGWIRQSPGRGLEWLGIIQKRSKWYNNYAVSVKSRITINPDTSKNQFSLQLNSVTPEDTAVYYCARYSYPFYSIDYWGQGTLVTVSSASTKMVSKGEELFTGVVPILVELDGDVNGHKFSVSGEGEGDATYGKLTLKFICTTGKLPVPWPTLVTTFGYGLQCFARYPDHMKQHDFFKSAMPEGYVQERTIFFKDDGNYKTRAEVKFEGDTLVNRIELKGIDFKEDGNILGHKLEYNYNSHNVYIMADKQKNGIKVNFKIRHNIEDGSVQLADHYQQNTPIGDGPVLLPDNHYLSYQSALSKDPNEKRDHMVLLEFVTAAGITLGMDELYKSGLRSTGSRSFTKQSISLASLPKMGMSSLKLLKYVLFFFNLLFWICGCCILGFGIYLLIHNNFGVLFHNLPSLTLGNVFVIVGSIIMVVAFLGCMGSIKENKCLLMSFFILLLIILLAEVTLAILLFVYEQKLNEYVAKGLTDSIHRYHSDNSTKAAWDSIQSFLQCCGINGTSDWTSGPPASCPSDRKVEGCYAKARLWFHSNFLYIGIITICVCVIEVLGMSFALTLNCQIDKTSQTIGLMSKGEELFTGVVPILVELDGDVNGQKFSVSGEGEGDATYGKLTLKFICTTGKLPVPWPTLVTTLSYGVQCFSRYPDHMKQHDFFKSAMPEGYVQERTIFYKDDGNYKTRAEVKFEGDTLVNRIELKGIDFKEDGNILGHKMEYNYNSHNVYIMADKPKNGIKVNFKIRHNIKDGSVQLADHYQQNTPIGDGPVLLPDNHYLSTQSALSKDPNEKRDHMILLEFVTAAGITHGMDELYK

SEQ ID NO: 134 - protein, 507 aa, Artificial Sequence
  TLR3signal-scFv12-TLR3Zloop-CD53
MRQTLPCIYFWGGLLPFGMLCASQSVLTQPPSVSVAPGQTARISCSGDNIGSYYVHWYQQKPGQAPVLVIYEDSERPSGIPERFSGSNSGNTATLTISGTQAEDEADYYCSSYDDPNFQVFGGGTKLTVLGQPKAAGGSGGSGGSGGSQVQLQQSGPGLVKPSQTLSLTCAISGDSVSSNSAAWGWIRQSPGRGLEWLGIIQKRSKWYNNYAVSVKSRITINPDTSKNQFSLQLNSVTPEDTAVYYCARYSYPFYSIDYWGQGTLVTVSSASTKSFTKQSISLASLPKMGMSSLKLLKYVLFFFNLLFWICGCCILGFGIYLLIHNNFGVLFHNLPSLTLGNVFVIVGSIIMVVAFLGCMGSIKENKCLLMSFFILLLIILLAEVTLAILLFVYEQKLNEYVAKGLTDSIHRYHSDNSTKAAWDSIQSFLQCCGINGTSDWTSGPPASCPSDRKVEGCYAKARLWFHSNFLYIGIITICVCVIEVLGMSFALTLNCQIDKTSQTIGL

SEQ ID NO: 135 - protein, 481 aa, Artificial Sequence
  CD53-TLR3Zloop-scFv1068
MGMSSLKLLKYVLFFFNLLFWICGCCILGFGIYLLIHNNFGVLFHNLPSLTLGNVFVIVGSIIMVVAFLGCMGSIKENKCLLMSFFILLLIILLAEVTLAILLFVYEQKLNEYVAKGLTDSIHRYHSDNSTKAAWDSIQSFLQCCGINGTSDWTSGPPASCPSDRKVEGCYAKARLWFHSNFLYIGIITICVCVIEVLGMSFALTLNCQIDKTSQTIGLSFTKQSISLASLPKDIQMTQSPASLSASVGETVTITCRASGNIHNYLAWYQQKQGKSPQLLVYNAKTLADGVPSRFSGSESGTQYSLKINSLQPEDFGSYYCQHFWSTPFTFGSGTKLELKRGTVAAGGSGGSGGSGGSQVQLQQPGAELVQPGTSVRLSCKASGYIFTTYWIHWVKQRPGQGLEWIGEINPNNGRINYNEKFKTKATLTVDKSSSTAYMQLSSLTSEDSAVYYCTRVGVMITTFPYWGQGTLVTVSAASTK

SEQ ID NO: 136 - protein, 719 aa, Artificial Sequence
  CD53-TLR3Zloop-GFP2-scFv1068
MGMSSLKLLKYVLFFFNLLFWICGCCILGFGIYLLIHNNFGVLFHNLPSLTLGNVFVIVGSIIMVVAFLGCMGSIKENKCLLMSFFILLLIILLAEVTLAILLFVYEQKLNEYVAKGLTDSIHRYHSDNSTKAAWDSIQSFLQCCGINGTSDWTSGPPASCPSDRKVEGCYAKARLWFHSNFLYIGIITICVCVIEVLGMSFALTLNCQIDKTSQTIGLSFTKQSISLASLPKMSKGEELFTGVVPILVELDGDVNGQKFSVSGEGEGDATYGKLTLKFICTTGKLPVPWPTLVTTLSYGVQCFSRYPDHMKQHDFFKSAMPEGYVQERTIFYKDDGNYKTRAEVKFEGDTLVNRIELKGIDFKEDGNILGHKMEYNYNSHNVYIMADKPKNGIKVNFKIRHNIKDGSVQLADHYQQNTPIGDGPVLLPDNHYLSTQSALSKDPNEKRDHMILLEFVTAAGITHGMDELYKDIQMTQSPASLSASVGETVTITCRASGNIHNYLAWYQQKQGKSPQLLVYNAKTLADGVPSRFSGSESGTQYSLKINSLQPEDFGSYYCQHFWSTPFTFGSGTKLELKRGTVAAGGSGGSGGSGGSQVQLQQPGAELVQPGTSVRLSCKASGYIFTTYWIHWVKQRPGQGLEWIGEINPNNGRINYNEKFKTKATLTVDKSSSTAYMQLSSLTSEDSAVYYCTRVGVMITTFPYWGQGTLVTVSAASTK

SEQ ID NO: 137 - protein, 990 aa, Artificial Sequence
  TLR3signal-scFv1068-EYFP-TLR3Zloop-CD53-GFP2
MRQTLPCIYFWGGLLPFGMLCASDIQMTQSPASLSASVGETVTITCRASGNIHNYLAWYQQKQGKSPQLLVYNAKTLADGVPSRFSGSESGTQYSLKINSLQPEDFGSYYCQHFWSTPFTFGSGTKLELKRGTVAAGGSGGSGGSGGSQVQLQQPGAELVQPGTSVRLSCKASGYIFTTYWIHWVKQRPGQGLEWIGEINPNNGRINYNEKFKTKATLTVDKSSSTAYMQLSSLTSEDSAVYYCTRVGVMITTFPYWGQGTLVTVSAASTKMVSKGEELFTGVVPILVELDGDVNGHKFSVSGEGEGDATYGKLTLKFICTTGKLPVPWPTLVTTFGYGLQCFARYPDHMKQHDFFKSAMPEGYVQERTIFFKDDGNYKTRAEVKFEGDTLVNRIELKGIDFKEDGNILGHKLEYNYNSHNVYIMADKQKNGIKVNFKIRHNIEDGSVQLADHYQQNTPIGDGPVLLPDNHYLSYQSALSKDPNEKRDHMVLLEFVTAAGITLGMDELYKSGLRSTGSRSFTKQSISLASLPKMGMSSLKLLKYVLFFFNLLFWICGCCILGFGIYLLIHNNFGVLFHNLPSLTLGNVFVIVGSIIMVVAFLGCMGSIKENKCLLMSFFILLLIILLAEVTLAILLFVYEQKLNEYVAKGLTDSIHRYHSDNSTKAAWDSIQSFLQCCGINGTSDWTSGPPASCPSDRKVEGCYAKARLWFHSNFLYIGIITICVCVIEVLGMSFALTLNCQIDKTSQTIGLMSKGEELFTGVVPILVELDGDVNGQKFSVSGEGEGDATYGKLTLKFICTTGKLPVPWPTLVTTLSYGVQCFSRYPDHMKQHDFFKSAMPEGYVQERTIFYKDDGNYKTRAEVKFEGDTLVNRIELKGIDFKEDGNILGHKMEYNYNSHNVYIMADKPKNGIKVNFKIRHNIKDGSVQLADHYQQNTPIGDGPVLLPDNHYLSTQSALSKDPNEKRDHMILLEFVTAAGITHGMDELYK

SEQ ID NO: 138 - protein, 504 aa, Artificial Sequence
  TLR3signal-scFv1068-TLR3Zloop-CD53
MRQTLPCIYFWGGLLPFGMLCASDIQMTQSPASLSASVGETVTITCRASGNIHNYLAWYQQKQGKSPQLLVYNAKTLADGVPSRFSGSESGTQYSLKINSLQPEDFGSYYCQHFWSTPFTFGSGTKLELKRGTVAAGGSGGSGGSGGSQVQLQQPGAELVQPGTSVRLSCKASGYIFTTYWIHWVKQRPGQGLEWIGEINPNNGRINYNEKFKTKATLTVDKSSSTAYMQLSSLTSEDSAVYYCTRVGVMITTFPYWGQGTLVTVSAASTKSFTKQSISLASLPKMGMSSLKLLKYVLFFFNLLFWICGCCILGFGIYLLIHNNFGVLFHNLPSLTLGNVFVIVGSIIMVVAFLGCMGSIKENKCLLMSFFILLLIILLAEVTLAILLFVYEQKLNEYVAKGLTDSIHRYHSDNSTKAAWDSIQSFLQCCGINGTSDWTSGPPASCPSDRKVEGCYAKARLWFHSNFLYIGIITICVCVIEVLGMSFALTLNCQIDKTSQTIGL

SEQ ID NO: 139 - protein, 551 aa, Artificial Sequence
  CD151-TLR7Zloop-GFP2
MGEFNEKKTTCGTVCLKYLLFTYNCCFWLAGLAVMAVGIWTLALKSDYISLLASGTYLATAYILVVAGTVVMVTGVLGCCATFKERRNLLRLYFILLLIIFLLEIIAGILAYAYYQQLNTELKENLKDTMTKRYHQPGHEAVTSAVDQLQQEFHCCGSNNSQDWRDSEWIRSQEAGGRVVPDSCCKTVVALCGQRDHASNIYKVEGGCITKLETFIQEHLRVIGAVGIGIACVQVFGMIFTCCLYRSLKLEHYNKISPSGDSSEVGFCSNARTSVESYEPQVLEQLHYFRYDKYARSCRFKNKEASFMSVNESMSKGEELFTGVVPILVELDGDVNGQKFSVSGEGEGDATYGKLTLKFICTTGKLPVPWPTLVTTLSYGVQCFSRYPDHMKQHDFFKSAMPEGYVQERTIFYKDDGNYKTRAEVKFEGDTLVNRIELKGIDFKEDGNILGHKMEYNYNSHNVYIMADKPKNGIKVNFKIRHNIKDGSVQLADHYQQNTPIGDGPVLLPDNHYLSTQSALSKDPNEKRDHMILLEFVTAAGITHGMDELYK

SEQ ID NO: 140 - protein, 825 aa, Artificial Sequence
  TLR7signal-EYFP-CD151-TLR7Zloop-GFP2
MVFPMWTLKRQILILFNIILISKLLGMVSKGEELFTGVVPILVELDGDVNGHKFSVSGEGEGDATYGKLTLKFICTTGKLPVPWPTLVTTFGYGLQCFARYPDHMKQHDFFKSAMPEGYVQERTIFFKDDGNYKTRAEVKFEGDTLVNRIELKGIDFKEDGNILGHKLEYNYNSHNVYIMADKQKNGIKVNFKIRHNIEDGSVQLADHYQQNTPIGDGPVLLPDNHYLSYQSALSKDPNEKRDHMVLLEFVTAAGITLGMDELYKSGLRSTGSRMGEFNEKKTTCGTVCLKYLLFTYNCCFWLAGLAVMAVGIWTLALKSDYISLLASGTYLATAYILVVAGTVVMVTGVLGCCATFKERRNLLRLYFILLLIIFLLEIIAGILAYAYYQQLNTELKENLKDTMTKRYHQPGHEAVTSAVDQLQQEFHCCGSNNSQDWRDSEWIRSQEAGGRVVPDSCCKTVVALCGQRDHASNIYKVEGGCITKLETFIQEHLRVIGAVGIGIACVQVFGMIFTCCLYRSLKLEHYNKISPSGDSSEVGFCSNARTSVESYEPQVLEQLHYFRYDKYARSCRFKNKEASFMSVNESMSKGEELFTGVVPILVELDGDVNGQKFSVSGEGEGDATYGKLTLKFICTTGKLPVPWPTLVTTLSYGVQCFSRYPDHMKQHDFFKSAMPEGYVQERTIFYKDDGNYKTRAEVKFEGDTLVNRIELKGIDFKEDGNILGHKMEYNYNSHNVYIMADKPKNGIKVNFKIRHNIKDGSVQLADHYQQNTPIGDGPVLLPDNHYLSTQSALSKDPNEKRDHMILLEFVTAAGITHGMDELYK

SEQ ID NO: 141 - protein, 825 aa, Artificial Sequence
  TLR7signal-EYFP-TLR7Zloop-CD151-GFP2
MVFPMWTLKRQILILFNIILISKLLGMVSKGEELFTGVVPILVELDGDVNGHKFSVSGEGEGDATYGKLTLKFICTTGKLPVPWPTLVTTFGYGLQCFARYPDHMKQHDFFKSAMPEGYVQERTIFFKDDGNYKTRAEVKFEGDTLVNRIELKGIDFKEDGNILGHKLEYNYNSHNVYIMADKQKNGIKVNFKIRHNIEDGSVQLADHYQQNTPIGDGPVLLPDNHYLSYQSALSKDPNEKRDHMVLLEFVTAAGITLGMDELYKSGLRSTGSRNKISPSGDSSEVGFCSNARTSVESYEPQVLEQLHYFRYDKYARSCRFKNKEASFMSVNESMGEFNEKKTTCGTVCLKYLLFTYNCCFWLAGLAVMAVGIWTLALKSDYISLLASGTYLATAYILVVAGTVVMVTGVLGCCATFKERRNLLRLYFILLLIIFLLEIIAGILAYAYYQQLNTELKENLKDTMTKRYHQPGHEAVTSAVDQLQQEFHCCGSNNSQDWRDSEWIRSQEAGGRVVPDSCCKTVVALCGQRDHASNIYKVEGGCITKLETFIQEHLRVIGAVGIGIACVQVFGMIFTCCLYRSLKLEHYMSKGEELFTGVVPILVELDGDVNGQKFSVSGEGEGDATYGKLTLKFICTTGKLPVPWPTLVTTLSYGVQCFSRYPDHMKQHDFFKSAMPEGYVQERTIFYKDDGNYKTRAEVKFEGDTLVNRIELKGIDFKEDGNILGHKMEYNYNSHNVYIMADKPKNGIKVNFKIRHNIKDGSVQLADHYQQNTPIGDGPVLLPDNHYLSTQSALSKDPNEKRDHMILLEFVTAAGITHGMDELYK

SEQ ID NO: 142 - protein, 542 aa, Artificial Sequence
  CD151-TLR8Zloop-GFP2
MGEFNEKKTTCGTVCLKYLLFTYNCCFWLAGLAVMAVGIWTLALKSDYISLLASGTYLATAYILVVAGTVVMVTGVLGCCATFKERRNLLRLYFILLLIIFLLEIIAGILAYAYYQQLNTELKENLKDTMTKRYHQPGHEAVTSAVDQLQQEFHCCGSNNSQDWRDSEWIRSQEAGGRVVPDSCCKTVVALCGQRDHASNIYKVEGGCITKLETFIQEHLRVIGAVGIGIACVQVFGMIFTCCLYRSLKLEHYNRISPLVKDTRQSYANSSSFQRHIRKRRSTDFEFDPHSNFYHFTRPLIKPQMSKGEELFTGVVPILVELDGDVNGQKFSVSGEGEGDATYGKLTLKFICTTGKLPVPWPTLVTTLSYGVQCFSRYPDHMKQHDFFKSAMPEGYVQERTIFYKDDGNYKTRAEVKFEGDTLVNRIELKGIDFKEDGNILGHKMEYNYNSHNVYIMADKPKNGIKVNFKIRHNIKDGSVQLADHYQQNTPIGDGPVLLPDNHYLSTQSALSKDPNEKRDHMILLEFVTAAGITHGMDELYK

SEQ ID NO: 143 - protein, 816 aa, Artificial Sequence
  TLR8signal-EYFP-CD151-TLR8Zloop-GFP2
MENMFLQSSMLTCIFLLISGSCELCAMVSKGEELFTGVVPILVELDGDVNGHKFSVSGEGEGDATYGKLTLKFICTTGKLPVPWPTLVTTFGYGLQCFARYPDHMKQHDFFKSAMPEGYVQERTIFFKDDGNYKTRAEVKFEGDTLVNRIELKGIDFKEDGNILGHKLEYNYNSHNVYIMADKQKNGIKVNFKIRHNIEDGSVQLADHYQQNTPIGDGPVLLPDNHYLSYQSALSKDPNEKRDHMVLLEFVTAAGITLGMDELYKSGLRSTGSRMGEFNEKKTTCGTVCLKYLLFTYNCCFWLAGLAVMAVGIWTLALKSDYISLLASGTYLATAYILVVAGTVVMVTGVLGCCATFKERRNLLRLYFILLLIIFLLEIIAGILAYAYYQQLNTELKENLKDTMTKRYHQPGHEAVTSAVDQLQQEFHCCGSNNSQDWRDSEWIRSQEAGGRVVPDSCCKTVVALCGQRDHASNIYKVEGGCITKLETFIQEHLRVIGAVGIGIACVQVFGMIFTCCLYRSLKLEHYNRISPLVKDTRQSYANSSSFQRHIRKRRSTDFEFDPHSNFYHFTRPLIKPQMSKGEELFTGVVPILVELDGDVNGQKFSVSGEGEGDATYGKLTLKFICTTGKLPVPWPTLVTTLSYGVQCFSRYPDHMKQHDFFKSAMPEGYVQERTIFYKDDGNYKTRAEVKFEGDTLVNRIELKGIDFKEDGNILGHKMEYNYNSHNVYIMADKPKNGIKVNFKIRHNIKDGSVQLADHYQQNTPIGDGPVLLPDNHYLSTQSALSKDPNEKRDHMILLEFVTAAGITHGMDELYK

SEQ ID NO: 144 - protein, 816 aa, Artificial Sequence
  TLR8signal-EYFP-TLR8Zloop-CD151-GFP2
MENMFLQSSMLTCIFLLISGSCELCAMVSKGEELFTGVVPILVELDGDVNGHKFSVSGEGEGDATYGKLTLKFICTTGKLPVPWPTLVTTFGYGLQCFARYPDHMKQHDFFKSAMPEGYVQERTIFFKDDGNYKTRAEVKFEGDTLVNRIELKGIDFKEDGNILGHKLEYNYNSHNVYIMADKQKNGIKVNFKIRHNIEDGSVQLADHYQQNTPIGDGPVLLPDNHYLSYQSALSKDPNEKRDHMVLLEFVTAAGITLGMDELYKSGLRSTGSRNRISPLVKDTRQSYANSSSFQRHIRKRRSTDFEFDPHSNFYHFTRPLIKPQMGEFNEKKTTCGTVCLKYLLFTYNCCFWLAGLAVMAVGIWTLALKSDYISLLASGTYLATAYILVVAGTVVMVTGVLGCCATFKERRNLLRLYFILLLIIFLLEIIAGILAYAYYQQLNTELKENLKDTMTKRYHQPGHEAVTSAVDQLQQEFHCCGSNNSQDWRDSEWIRSQEAGGRVVPDSCCKTVVALCGQRDHASNIYKVEGGCITKLETFIQEHLRVIGAVGIGIACVQVFGMIFTCCLYRSLKLEHYMSKGEELFTGVVPILVELDGDVNGQKFSVSGEGEGDATYGKLTLKFICTTGKLPVPWPTLVTTLSYGVQCFSRYPDHMKQHDFFKSAMPEGYVQERTIFYKDDGNYKTRAEVKFEGDTLVNRIELKGIDFKEDGNILGHKMEYNYNSHNVYIMADKPKNGIKVNFKIRHNIKDGSVQLADHYQQNTPIGDGPVLLPDNHYLSTQSALSKDPNEKRDHMILLEFVTAAGITHGMDELYK

SEQ ID NO: 145 - protein, 536 aa, Artificial Sequence
  CD151-TLR9Zloop-GFP2
MGEFNEKKTTCGTVCLKYLLFTYNCCFWLAGLAVMAVGIWTLALKSDYISLLASGTYLATAYILVVAGTVVMVTGVLGCCATFKERRNLLRLYFILLLIIFLLEIIAGILAYAYYQQLNTELKENLKDTMTKRYHQPGHEAVTSAVDQLQQEFHCCGSNNSQDWRDSEWIRSQEAGGRVVPDSCCKTVVALCGQRDHASNIYKVEGGCITKLETFIQEHLRVIGAVGIGIACVQVFGMIFTCCLYRSLKLEHYNRISGASELTATMGEADGGEKVWLQPGDLAPAPVDTPSSEDFRPNMSKGEELFTGVVPILVELDGDVNGQKFSVSGEGEGDATYGKLTLKFICTTGKLPVPWPTLVTTLSYGVQCFSRYPDHMKQHDFFKSAMPEGYVQERTIFYKDDGNYKTRAEVKFEGDTLVNRIELKGIDFKEDGNILGHKMEYNYNSHNVYIMADKPKNGIKVNFKIRHNIKDGSVQLADHYQQNTPIGDGPVLLPDNHYLSTQSALSKDPNEKRDHMILLEFVTAAGITHGMDELYK

SEQ ID NO: 146 - protein, 809 aa, Artificial Sequence
  TLR9signal-EYFP-CD151-TLR9Zloop-GFP2
MGFCRSALHPLSLLVQAIMLAMTLAMVSKGEELFTGVVPILVELDGDVNGHKFSVSGEGEGDATYGKLTLKFICTTGKLPVPWPTLVTTFGYGLQCFARYPDHMKQHDFFKSAMPEGYVQERTIFFKDDGNYKTRAEVKFEGDTLVNRIELKGIDFKEDGNILGHKLEYNYNSHNVYIMADKQKNGIKVNFKIRHNIEDGSVQLADHYQQNTPIGDGPVLLPDNHYLSYQSALSKDPNEKRDHMVLLEFVTAAGITLGMDELYKSGLRSTGSRMGEFNEKKTTCGTVCLKYLLFTYNCCFWLAGLAVMAVGIWTLALKSDYISLLASGTYLATAYILVVAGTVVMVTGVLGCCATFKERRNLLRLYFILLLIIFLLEIIAGILAYAYYQQLNTELKENLKDTMTKRYHQPGHEAVTSAVDQLQQEFHCCGSNNSQDWRDSEWIRSQEAGGRVVPDSCCKTVVALCGQRDHASNIYKVEGGCITKLETFIQEHLRVIGAVGIGIACVQVFGMIFTCCLYRSLKLEHYNRISGASELTATMGEADGGEKVWLQPGDLAPAPVDTPSSEDFRPNMSKGEELFTGVVPILVELDGDVNGQKFSVSGEGEGDATYGKLTLKFICTTGKLPVPWPTLVTTLSYGVQCFSRYPDHMKQHDFFKSAMPEGYVQERTIFYKDDGNYKTRAEVKFEGDTLVNRIELKGIDFKEDGNILGHKMEYNYNSHNVYIMADKPKNGIKVNFKIRHNIKDGSVQLADHYQQNTPIGDGPVLLPDNHYLSTQSALSKDPNEKRDHMILLEFVTAAGITHGMDELYK

SEQ ID NO: 147 - protein, 809 aa, Artificial Sequence
  TLR9signal-EYFP-TLR9Zloop-CD151-GFP2
MGFCRSALHPLSLLVQAIMLAMTLAMVSKGEELFTGVVPILVELDGDVNGHKFSVSGEGEGDATYGKLTLKFICTTGKLPVPWPTLVTTFGYGLQCFARYPDHMKQHDFFKSAMPEGYVQERTIFFKDDGNYKTRAEVKFEGDTLVNRIELKGIDFKEDGNILGHKLEYNYNSHNVYIMADKQKNGIKVNFKIRHNIEDGSVQLADHYQQNTPIGDGPVLLPDNHYLSYQSALSKDPNEKRDHMVLLEFVTAAGITLGMDELYKSGLRSTGSRNRISGASELTATMGEADGGEKVWLQPGDLAPAPVDTPSSEDFRPNMGEFNEKKTTCGTVCLKYLLFTYNCCFWLAGLAVMAVGIWTLALKSDYISLLASGTYLATAYILVVAGTVVMVTGVLGCCATFKERRNLLRLYFILLLIIFLLEIIAGILAYAYYQQLNTELKENLKDTMTKRYHQPGHEAVTSAVDQLQQEFHCCGSNNSQDWRDSEWIRSQEAGGRVVPDSCCKTVVALCGQRDHASNIYKVEGGCITKLETFIQEHLRVIGAVGIGIACVQVFGMIFTCCLYRSLKLEHYMSKGEELFTGVVPILVELDGDVNGQKFSVSGEGEGDATYGKLTLKFICTTGKLPVPWPTLVTTLSYGVQCFSRYPDHMKQHDFFKSAMPEGYVQERTIFYKDDGNYKTRAEVKFEGDTLVNRIELKGIDFKEDGNILGHKMEYNYNSHNVYIMADKPKNGIKVNFKIRHNIKDGSVQLADHYQQNTPIGDGPVLLPDNHYLSTQSALSKDPNEKRDHMILLEFVTAAGITHGMDELYK

SEQ ID NO: 148 - protein, 505 aa, Artificial Sequence
  CD151-TLR3Zloop-GFP2
MGEFNEKKTTCGTVCLKYLLFTYNCCFWLAGLAVMAVGIWTLALKSDYISLLASGTYLATAYILVVAGTVVMVTGVLGCCATFKERRNLLRLYFILLLIIFLLEIIAGILAYAYYQQLNTELKENLKDTMTKRYHQPGHEAVTSAVDQLQQEFHCCGSNNSQDWRDSEWIRSQEAGGRVVPDSCCKTVVALCGQRDHASNIYKVEGGCITKLETFIQEHLRVIGAVGIGIACVQVFGMIFTCCLYRSLKLEHYSFTKQSISLASLPKMSKGEELFTGVVPILVELDGDVNGQKFSVSGEGEGDATYGKLTLKFICTTGKLPVPWPTLVTTLSYGVQCFSRYPDHMKQHDFFKSAMPEGYVQERTIFYKDDGNYKTRAEVKFEGDTLVNRIELKGIDFKEDGNILGHKMEYNYNSHNVYIMADKPKNGIKVNFKIRHNIKDGSVQLADHYQQNTPIGDGPVLLPDNHYLSTQSALSKDPNEKRDHMILLEFVTAAGITHGMDELYK

SEQ ID NO: 149 - protein, 776 aa, Artificial Sequence
  TLR3signal-EYFP-TLR3Zloop-CD151-GFP2
MRQTLPCIYFWGGLLPFGMLCASMVSKGEELFTGVVPILVELDGDVNGHKFSVSGEGEGDATYGKLTLKFICTTGKLPVPWPTLVTTFGYGLQCFARYPDHMKQHDFFKSAMPEGYVQERTIFFKDDGNYKTRAEVKFEGDTLVNRIELKGIDFKEDGNILGHKLEYNYNSHNVYIMADKQKNGIKVNFKIRHNIEDGSVQLADHYQQNTPIGDGPVLLPDNHYLSYQSALSKDPNEKRDHMVLLEFVTAAGITLGMDELYKSGLRSTGSRSFTKQSISLASLPKMGEFNEKKTTCGTVCLKYLLFTYNCCFWLAGLAVMAVGIWTLALKSDYISLLASGTYLATAYILVVAGTVVMVTGVLGCCATFKERRNLLRLYFILLLIIFLLEIIAGILAYAYYQQLNTELKENLKDTMTKRYHQPGHEAVTSAVDQLQQEFHCCGSNNSQDWRDSEWIRSQEAGGRVVPDSCCKTVVALCGQRDHASNIYKVEGGCITKLETFIQEHLRVIGAVGIGIACVQVFGMIFTCCLYRSLKLEHYMSKGEELFTGVVPILVELDGDVNGQKFSVSGEGEGDATYGKLTLKFICTTGKLPVPWPTLVTTLSYGVQCFSRYPDHMKQHDFFKSAMPEGYVQERTIFYKDDGNYKTRAEVKFEGDTLVNRIELKGIDFKEDGNILGHKMEYNYNSHNVYIMADKPKNGIKVNFKIRHNIKDGSVQLADHYQQNTPIGDGPVLLPDNHYLSTQSALSKDPNEKRDHMILLEFVTAAGITHGMDELYK

SEQ ID NO: 150 - protein, 515 aa, Artificial Sequence
  CD151-TLR3Zloop-scFv15
MGEFNEKKTTCGTVCLKYLLFTYNCCFWLAGLAVMAVGIWTLALKSDYISLLASGTYLATAYILVVAGTVVMVTGVLGCCATFKERRNLLRLYFILLLIIFLLEIIAGILAYAYYQQLNTELKENLKDTMTKRYHQPGHEAVTSAVDQLQQEFHCCGSNNSQDWRDSEWIRSQEAGGRVVPDSCCKTVVALCGQRDHASNIYKVEGGCITKLETFIQEHLRVIGAVGIGIACVQVFGMIFTCCLYRSLKLEHYSFTKQSISLASLPKDIQMTQSPSSLSASVGDRVTITCRASQSIGLYLAWYQQKPGKAPKLLIYAASSLQSGVPSRFSGSGSGTDFTLTISSLQPEDFATYYCQQGNTLSYTFGQGTKVEIKRTVAGGSGGSGGSGGSEVQLVQSGAEVKKPGESLKISCKGSGYSFTNYWVGWVRQMPGKGLEWMGFIDPSDSYTNYAPSFQGQVTISADKSISTAYLQWSSLKASDTAMYYCARELYQGYMDTFDSWGQGTLVTVSSASTK

SEQ ID NO: 151 - protein, 753 aa, Artificial Sequence
  CD151-TLR3Zloop-GFP2-scFv15
MGEFNEKKTTCGTVCLKYLLFTYNCCFWLAGLAVMAVGIWTLALKSDYISLLASGTYLATAYILVVAGTVVMVTGVLGCCATFKERRNLLRLYFILLLIIFLLEIIAGILAYAYYQQLNTELKENLKDTMTKRYHQPGHEAVTSAVDQLQQEFHCCGSNNSQDWRDSEWIRSQEAGGRVVPDSCCKTVVALCGQRDHASNIYKVEGGCITKLETFIQEHLRVIGAVGIGIACVQVFGMIFTCCLYRSLKLEHYSFTKQSISLASLPKMSKGEELFTGVVPILVELDGDVNGQKFSVSGEGEGDATYGKLTLKFICTTGKLPVPWPTLVTTLSYGVQCFSRYPDHMKQHDFFKSAMPEGYVQERTIFYKDDGNYKTRAEVKFEGDTLVNRIELKGIDFKEDGNILGHKMEYNYNSHNVYIMADKPKNGIKVNFKIRHNIKDGSVQLADHYQQNTPIGDGPVLLPDNHYLSTQSALSKDPNEKRDHMILLEFVTAAGITHGMDELYKDIQMTQSPSSLSASVGDRVTITCRASQSIGLYLAWYQQKPGKAPKLLIYAASSLQSGVPSRFSGSGSGTDFTLTISSLQPEDFATYYCQQGNTLSYTFGQGTKVEIKRTVAGGSGGSGGSGGSEVQLVQSGAEVKKPGESLKISCKGSGYSFTNYWVGWVRQMPGKGLEWMGFIDPSDSYTNYAPSFQGQVTISADKSISTAYLQWSSLKASDTAMYYCARELYQGYMDTFDSWGQGTLVTVSSASTK

SEQ ID NO: 152 - protein, 1024 aa, Artificial Sequence
  TLR3signal-scFv15-EYFP-TLR3Zloop-CD151-GFP2
MRQTLPCIYFWGGLLPFGMLCASDIQMTQSPSSLSASVGDRVTITCRASQSIGLYLAWYQQKPGKAPKLLIYAASSLQSGVPSRFSGSGSGTDFTLTISSLQPEDFATYYCQQGNTLSYTFGQGTKVEIKRTVAGGSGGSGGSGGSEVQLVQSGAEVKKPGESLKISCKGSGYSFTNYWVGWVRQMPGKGLEWMGFIDPSDSYTNYAPSFQGQVTISADKSISTAYLQWSSLKASDTAMYYCARELYQGYMDTFDSWGQGTLVTVSSASTKMVSKGEELFTGVVPILVELDGDVNGHKFSVSGEGEGDATYGKLTLKFICTTGKLPVPWPTLVTTFGYGLQCFARYPDHMKQHDFFKSAMPEGYVQERTIFFKDDGNYKTRAEVKFEGDTLVNRIELKGIDFKEDGNILGHKLEYNYNSHNVYIMADKQKNGIKVNFKIRHNIEDGSVQLADHYQQNTPIGDGPVLLPDNHYLSYQSALSKDPNEKRDHMVLLEFVTAAGITLGMDELYKSGLRSTGSRSFTKQSISLASLPKMGEFNEKKTTCGTVCLKYLLFTYNCCFWLAGLAVMAVGIWTLALKSDYISLLASGTYLATAYILVVAGTVVMVTGVLGCCATFKERRNLLRLYFILLLIIFLLEIIAGILAYAYYQQLNTELKENLKDTMTKRYHQPGHEAVTSAVDQLQQEFHCCGSNNSQDWRDSEWIRSQEAGGRVVPDSCCKTVVALCGQRDHASNIYKVEGGCITKLETFIQEHLRVIGAVGIGIACVQVFGMIFTCCLYRSLKLEHYMSKGEELFTGVVPILVELDGDVNGQKFSVSGEGEGDATYGKLTLKFICTTGKLPVPWPTLVTTLSYGVQCFSRYPDHMKQHDFFKSAMPEGYVQERTIFYKDDGNYKTRAEVKFEGDTLVNRIELKGIDFKEDGNILGHKMEYNYNSHNVYIMADKPKNGIKVNFKIRHNIKDGSVQLADHYQQNTPIGDGPVLLPDNHYLSTQSALSKDPNEKRDHMILLEFVTAAGITHGMDELYK

SEQ ID NO: 153 - protein, 538 aa, Artificial Sequence
  TLR3signal-scFv15-TLR3Zloop-CD151
MRQTLPCIYFWGGLLPFGMLCASDIQMTQSPSSLSASVGDRVTITCRASQSIGLYLAWYQQKPGKAPKLLIYAASSLQSGVPSRFSGSGSGTDFTLTISSLQPEDFATYYCQQGNTLSYTFGQGTKVEIKRTVAGGSGGSGGSGGSEVQLVQSGAEVKKPGESLKISCKGSGYSFTNYWVGWVRQMPGKGLEWMGFIDPSDSYTNYAPSFQGQVTISADKSISTAYLQWSSLKASDTAMYYCARELYQGYMDTFDSWGQGTLVTVSSASTKSFTKQSISLASLPKMGEFNEKKTTCGTVCLKYLLFTYNCCFWLAGLAVMAVGIWTLALKSDYISLLASGTYLATAYILVVAGTVVMVTGVLGCCATFKERRNLLRLYFILLLIIFLLEIIAGILAYAYYQQLNTELKENLKDTMTKRYHQPGHEAVTSAVDQLQQEFHCCGSNNSQDWRDSEWIRSQEAGGRVVPDSCCKTVVALCGQRDHASNIYKVEGGCITKLETFIQEHLRVIGAVGIGIACVQVFGMIFTCCLYRSLKLEHY

SEQ ID NO: 154 - protein, 518 aa, Artificial Sequence
  CD151-TLR3Zloop-scFv12
MGEFNEKKTTCGTVCLKYLLFTYNCCFWLAGLAVMAVGIWTLALKSDYISLLASGTYLATAYILVVAGTVVMVTGVLGCCATFKERRNLLRLYFILLLIIFLLEIIAGILAYAYYQQLNTELKENLKDTMTKRYHQPGHEAVTSAVDQLQQEFHCCGSNNSQDWRDSEWIRSQEAGGRVVPDSCCKTVVALCGQRDHASNIYKVEGGCITKLETFIQEHLRVIGAVGIGIACVQVFGMIFTCCLYRSLKLEHYSFTKQSISLASLPKQSVLTQPPSVSVAPGQTARISCSGDNIGSYYVHWYQQKPGQAPVLVIYEDSERPSGIPERFSGSNSGNTATLTISGTQAEDEADYYCSSYDDPNFQVFGGGTKLTVLGQPKAAGGSGGSGGSGGSQVQLQQSGPGLVKPSQTLSLTCAISGDSVSSNSAAWGWIRQSPGRGLEWLGIIQKRSKWYNNYAVSVKSRITINPDTSKNQFSLQLNSVTPEDTAVYYCARYSYPFYSIDYWGQGTLVTVSSASTK

SEQ ID NO: 155 - protein, 756 aa, Artificial Sequence
  CD151-TLR3Zloop-GFP2-scFv12
MGEFNEKKTTCGTVCLKYLLFTYNCCFWLAGLAVMAVGIWTLALKSDYISLLASGTYLATAYILVVAGTVVMVTGVLGCCATFKERRNLLRLYFILLLIIFLLEIIAGILAYAYYQQLNTELKENLKDTMTKRYHQPGHEAVTSAVDQLQQEFHCCGSNNSQDWRDSEWIRSQEAGGRVVPDSCCKTVVALCGQRDHASNIYKVEGGCITKLETFIQEHLRVIGAVGIGIACVQVFGMIFTCCLYRSLKLEHYSFTKQSISLASLPKMSKGEELFTGVVPILVELDGDVNGQKFSVSGEGEGDATYGKLTLKFICTTGKLPVPWPTLVTTLSYGVQCFSRYPDHMKQHDFFKSAMPEGYVQERTIFYKDDGNYKTRAEVKFEGDTLVNRIELKGIDFKEDGNILGHKMEYNYNSHNVYIMADKPKNGIKVNFKIRHNIKDGSVQLADHYQQNTPIGDGPVLLPDNHYLSTQSALSKDPNEKRDHMILLEFVTAAGITHGMDELYKQSVLTQPPSVSVAPGQTARISCSGDNIGSYYVHWYQQKPGQAPVLVIYEDSERPSGIPERFSGSNSGNTATLTISGTQAEDEADYYCSSYDDPNFQVFGGGTKLTVLGQPKAAGGSGGSGGSGGSQVQLQQSGPGLVKPSQTLSLTCAISGDSVSSNSAAWGWIRQSPGRGLEWLGIIQKRSKWYNNYAVSVKSRITINPDTSKNQFSLQLNSVTPEDTAVYYCARYSYPFYSIDYWGQGTLVTVSSASTK

SEQ ID NO: 156 - protein, 1027 aa, Artificial Sequence
  TLR3signal-scFv12-EYFP-TLR3Zloop-CD151-GFP2
MRQTLPCIYFWGGLLPFGMLCASQSVLTQPPSVSVAPGQTARISCSGDNIGSYYVHWYQQKPGQAPVLVIYEDSERPSGIPERFSGSNSGNTATLTISGTQAEDEADYYCSSYDDPNFQVFGGGTKLTVLGQPKAAGGSGGSGGSGGSQVQLQQSGPGLVKPSQTLSLTCAISGDSVSSNSAAWGWIRQSPGRGLEWLGIIQKRSKWYNNYAVSVKSRITINPDTSKNQFSLQLNSVTPEDTAVYYCARYSYPFYSIDYWGQGTLVTVSSASTKMVSKGEELFTGVVPILVELDGDVNGHKFSVSGEGEGDATYGKLTLKFICTTGKLPVPWPTLVTTFGYGLQCFARYPDHMKQHDFFKSAMPEGYVQERTIFFKDDGNYKTRAEVKFEGDTLVNRIELKGIDFKEDGNILGHKLEYNYNSHNVYIMADKQKNGIKVNFKIRHNIEDGSVQLADHYQQNTPIGDGPVLLPDNHYLSYQSALSKDPNEKRDHMVLLEFVTAAGITLGMDELYKSGLRSTGSRSFTKQSISLASLPKMGEFNEKKTTCGTVCLKYLLFTYNCCFWLAGLAVMAVGIWTLALKSDYISLLASGTYLATAYILVVAGTVVMVTGVLGCCATFKERRNLLRLYFILLLIIFLLEIIAGILAYAYYQQLNTELKENLKDTMTKRYHQPGHEAVTSAVDQLQQEFHCCGSNNSQDWRDSEWIRSQEAGGRVVPDSCCKTVVALCGQRDHASNIYKVEGGCITKLETFIQEHLRVIGAVGIGIACVQVFGMIFTCCLYRSLKLEHYMSKGEELFTGVVPILVELDGDVNGQKFSVSGEGEGDATYGKLTLKFICTTGKLPVPWPTLVTTLSYGVQCFSRYPDHMKQHDFFKSAMPEGYVQERTIFYKDDGNYKTRAEVKFEGDTLVNRIELKGIDFKEDGNILGHKMEYNYNSHNVYIMADKPKNGIKVNFKIRHNIKDGSVQLADHYQQNTPIGDGPVLLPDNHYLSTQSALSKDPNEKRDHMILLEFVTAAGITHGMDELYK

SEQ ID NO: 157 - protein, 541 aa, Artificial Sequence
  TLR3signal-scFv12-TLR3Zloop-CD151
MRQTLPCIYFWGGLLPFGMLCASQSVLTQPPSVSVAPGQTARISCSGDNIGSYYVHWYQQKPGQAPVLVIYEDSERPSGIPERFSGSNSGNTATLTISGTQAEDEADYYCSSYDDPNFQVFGGGTKLTVLGQPKAAGGSGGSGGSGGSQVQLQQSGPGLVKPSQTLSLTCAISGDSVSSNSAAWGWIRQSPGRGLEWLGIIQKRSKWYNNYAVSVKSRITINPDTSKNQFSLQLNSVTPEDTAVYYCARYSYPFYSIDYWGQGTLVTVSSASTKSFTKQSISLASLPKMGEFNEKKTTCGTVCLKYLLFTYNCCFWLAGLAVMAVGIWTLALKSDYISLLASGTYLATAYILVVAGTVVMVTGVLGCCATFKERRNLLRLYFILLLIIFLLEIIAGILAYAYYQQLNTELKENLKDTMTKRYHQPGHEAVTSAVDQLQQEFHCCGSNNSQDWRDSEWIRSQEAGGRVVPDSCCKTVVALCGQRDHASNIYKVEGGCITKLETFIQEHLRVIGAVGIGIACVQVFGMIFTCCLYRSLKLEHY

SEQ ID NO: 158 - protein, 515 aa, Artificial Sequence
  CD151-TLR3Zloop-scFv1068
MGEFNEKKTTCGTVCLKYLLFTYNCCFWLAGLAVMAVGIWTLALKSDYISLLASGTYLATAYILVVAGTVVMVTGVLGCCATFKERRNLLRLYFILLLIIFLLEIIAGILAYAYYQQLNTELKENLKDTMTKRYHQPGHEAVTSAVDQLQQEFHCCGSNNSQDWRDSEWIRSQEAGGRVVPDSCCKTVVALCGQRDHASNIYKVEGGCITKLETFIQEHLRVIGAVGIGIACVQVFGMIFTCCLYRSLKLEHYSFTKQSISLASLPKDIQMTQSPASLSASVGETVTITCRASGNIHNYLAWYQQKQGKSPQLLVYNAKTLADGVPSRFSGSESGTQYSLKINSLQPEDFGSYYCQHFWSTPFTFGSGTKLELKRGTVAAGGSGGSGGSGGSQVQLQQPGAELVQPGTSVRLSCKASGYIFTTYWIHWVKQRPGQGLEWIGEINPNNGRINYNEKFKTKATLTVDKSSSTAYMQLSSLTSEDSAVYYCTRVGVMITTFPYWGQGTLVTVSAASTK

SEQ ID NO: 159 - protein, 753 aa, Artificial Sequence
  CD151-TLR3Zloop-GFP2-scFv1068
MGEFNEKKTTCGTVCLKYLLFTYNCCFWLAGLAVMAVGIWTLALKSDYISLLASGTYLATAYILVVAGTVVMVTGVLGCCATFKERRNLLRLYFILLLIIFLLEIIAGILAYAYYQQLNTELKENLKDTMTKRYHQPGHEAVTSAVDQLQQEFHCCGSNNSQDWRDSEWIRSQEAGGRVVPDSCCKTVVALCGQRDHASNIYKVEGGCITKLETFIQEHLRVIGAVGIGIACVQVFGMIFTCCLYRSLKLEHYSFTKQSISLASLPKMSKGEELFTGVVPILVELDGDVNGQKFSVSGEGEGDATYGKLTLKFICTTGKLPVPWPTLVTTLSYGVQCFSRYPDHMKQHDFFKSAMPEGYVQERTIFYKDDGNYKTRAEVKFEGDTLVNRIELKGIDFKEDGNILGHKMEYNYNSHNVYIMADKPKNGIKVNFKIRHNIKDGSVQLADHYQQNTPIGDGPVLLPDNHYLSTQSALSKDPNEKRDHMILLEFVTAAGITHGMDELYKDIQMTQSPASLSASVGETVTITCRASGNIHNYLAWYQQKQGKSPQLLVYNAKTLADGVPSRFSGSESGTQYSLKINSLQPEDFGSYYCQHFWSTPFTFGSGTKLELKRGTVAAGGSGGSGGSGGSQVQLQQPGAELVQPGTSVRLSCKASGYIFTTYWIHWVKQRPGQGLEWIGEINPNNGRINYNEKFKTKATLTVDKSSSTAYMQLSSLTSEDSAVYYCTRVGVMITTFPYWGQGTLVTVSAASTK

SEQ ID NO: 160 - protein, 1024 aa, Artificial Sequence
  TLR3signal-scFv1068-EYFP-TLR3Zloop-CD151-GFP2
MRQTLPCIYFWGGLLPFGMLCASDIQMTQSPASLSASVGETVTITCRASGNIHNYLAWYQQKQGKSPQLLVYNAKTLADGVPSRFSGSESGTQYSLKINSLQPEDFGSYYCQHFWSTPFTFGSGTKLELKRGTVAAGGSGGSGGSGGSQVQLQQPGAELVQPGTSVRLSCKASGYIFTTYWIHWVKQRPGQGLEWIGEINPNNGRINYNEKFKTKATLTVDKSSSTAYMQLSSLTSEDSAVYYCTRVGVMITTFPYWGQGTLVTVSAASTKMVSKGEELFTGVVPILVELDGDVNGHKFSVSGEGEGDATYGKLTLKFICTTGKLPVPWPTLVTTFGYGLQCFARYPDHMKQHDFFKSAMPEGYVQERTIFFKDDGNYKTRAEVKFEGDTLVNRIELKGIDFKEDGNILGHKLEYNYNSHNVYIMADKQKNGIKVNFKIRHNIEDGSVQLADHYQQNTPIGDGPVLLPDNHYLSYQSALSKDPNEKRDHMVLLEFVTAAGITLGMDELYKSGLRSTGSRSFTKQSISLASLPKMGEFNEKKTTCGTVCLKYLLFTYNCCFWLAGLAVMAVGIWTLALKSDYISLLASGTYLATAYILVVAGTVVMVTGVLGCCATFKERRNLLRLYFILLLIIFLLEIIAGILAYAYYQQLNTELKENLKDTMTKRYHQPGHEAVTSAVDQLQQEFHCCGSNNSQDWRDSEWIRSQEAGGRVVPDSCCKTVVALCGQRDHASNIYKVEGGCITKLETFIQEHLRVIGAVGIGIACVQVFGMIFTCCLYRSLKLEHYMSKGEELFTGVVPILVELDGDVNGQKFSVSGEGEGDATYGKLTLKFICTTGKLPVPWPTLVTTLSYGVQCFSRYPDHMKQHDFFKSAMPEGYVQERTIFYKDDGNYKTRAEVKFEGDTLVNRIELKGIDFKEDGNILGHKMEYNYNSHNVYIMADKPKNGIKVNFKIRHNIKDGSVQLADHYQQNTPIGDGPVLLPDNHYLSTQSALSKDPNEKRDHMILLEFVTAAGITHGMDELYK

SEQ ID NO: 161 - protein, 538 aa, Artificial Sequence
  TLR3signal-scFv1068-TLR3Zloop-CD151
MRQTLPCIYFWGGLLPFGMLCASDIQMTQSPASLSASVGETVTITCRASGNIHNYLAWYQQKQGKSPQLLVYNAKTLADGVPSRFSGSESGTQYSLKINSLQPEDFGSYYCQHFWSTPFTFGSGTKLELKRGTVAAGGSGGSGGSGGSQVQLQQPGAELVQPGTSVRLSCKASGYIFTTYWIHWVKQRPGQGLEWIGEINPNNGRINYNEKFKTKATLTVDKSSSTAYMQLSSLTSEDSAVYYCTRVGVMITTFPYWGQGTLVTVSAASTKSFTKQSISLASLPKMGEFNEKKTTCGTVCLKYLLFTYNCCFWLAGLAVMAVGIWTLALKSDYISLLASGTYLATAYILVVAGTVVMVTGVLGCCATFKERRNLLRLYFILLLIIFLLEIIAGILAYAYYQQLNTELKENLKDTMTKRYHQPGHEAVTSAVDQLQQEFHCCGSNNSQDWRDSEWIRSQEAGGRVVPDSCCKTVVALCGQRDHASNIYKVEGGCITKLETFIQEHLRVIGAVGIGIACVQVFGMIFTCCLYRSLKLEHY

SEQ ID NO: 162 - protein, 6 aa, Artificial Sequence
  Linker
GGEGGG

SEQ ID NO: 163 - protein, 8 aa, Artificial Sequence
  Linker
GGEEEGGG

SEQ ID NO: 164 - protein, 5 aa, Artificial Sequence
  Linker
GEEEG

SEQ ID NO: 165 - protein, 4 aa, Artificial Sequence
  Linker
GEEE

SEQ ID NO: 166 - protein, 6 aa, Artificial Sequence
  Linker
GGDGGG

SEQ ID NO: 167 - protein, 7 aa, Artificial Sequence
  Linker
GGDDDGG

SEQ ID NO: 168 - protein, 4 aa, Artificial Sequence
  Linker
GDDD

SEQ ID NO: 169 - protein, 4 aa, Artificial Sequence
  Linker
GDDD

SEQ ID NO: 170 - protein, 21 aa, Artificial Sequence
  Linker
GGGGSDDSDEGSDGEDGGGGS

SEQ ID NO: 171 - protein, 5 aa, Artificial Sequence
  Linker
WEWEW

SEQ ID NO: 172 - protein, 5 aa, Artificial Sequence
  Linker
FEFEF

SEQ ID NO: 173 - protein, 6 aa, Artificial Sequence
  Linker
EEEWWW

SEQ ID NO: 174 - protein, 6 aa, Artificial Sequence
  Linker
EEEFFF

SEQ ID NO: 175 - protein, 7 aa, Artificial Sequence
  Linker
WWEEEWW

SEQ ID NO: 176 - protein, 7 aa, Artificial Sequence
  Linker
FFEEEFF

SEQ ID NO: 177 - protein, 22 aa, Artificial Sequence
  Flexible Linker
GSGSATGGSGSTASSGSGSATH

SEQ ID NO: 178 - protein, 22 aa, Artificial Sequence
  Flexible Linker
HGSGSATGGSGSTASSGSGSAT

SEQ ID NO: 179 - protein, 19 aa, Artificial Sequence
  Rigid Linker
AEAAAKEAAAKEAAAKAGG

SEQ ID NO: 180 - protein, 60 aa, Homo sapiens
NKISPSGDSSEVGFCSNARTSVESYEPQVLEQLHYFRYDKYARSCRFKNKEASFMSVNES

SEQ ID NO: 181 - protein, 51 aa, Homo sapiens
NRISPLVKDTRQSYAQSSSFQRHIRKRRSTDFEFDPHSNFYHFTRPLIKPQ

SEQ ID NO: 182 - protein, 45 aa, Homo sapiens
NRISGASELTATMGEADGGEKVWLQPGDLAPAPVDTPSSEDFRPN

SEQ ID NO: 183 - protein, 51 aa, Equus caballus
NRISGAVEPVATTGEVDGGKKVWLTSRDLTPGPLDTPSSEDFMPSCKNLSF

SEQ ID NO: 184 - protein, 14 aa, Homo sapiens
SFTKQSISLASLPK

SEQ ID NO: 185 - protein, 5 aa, Artificial Sequence
  Linker
GGGGS

SEQ ID NO: 186 - protein, 10 aa, Artificial Sequence
  Linker
GGGGSGGGGS

SEQ ID NO: 187 - protein, 25 aa, Artificial Sequence
  Linker
GGGGSGGGGSGGGGSGGGGSGGGGS

What is claimed is:

1. An engineered extracellular vesicle comprising a fusion protein having tetraspanin, or a functional fragment thereof, linked to an anti-TLR antibody, or a functional fragment thereof, that serve as a targeting moiety and inhibits the activation of a cell surface expressed TLR to induce proinflammatory responses;
wherein the anti-TLR antibody is expressed on the exterior of the engineered extracellular vesicle.

2. The engineered extracellular vesicle of claim 1, wherein the tetraspanin is selected from the group consisting of TSPAN1, TSPAN2, TSPAN3, TSPAN4, TSPAN5, TSPAN6, TSPAN7, TSPAN8, TSPAN9, TSPAN10, TSPAN11, TSPAN12, TSPAN13, TSPAN14, TSPAN15, TSPAN16, TSPAN17, TSPAN18, TSPAN19, TSPAN20 (uroplakin 18), TSPAN21 (uroplakin1A) TSPAN22 (peripherin2), TSPAN23 (retinal outer segment membrane protein1), TSPAN24 (CD151), TSPAN25 (CD53), TSPAN26 (CD37), TSPAN27 (CD82), TSPAN28 (CD81), TSPAN29 (CD9), TSPAN30 (CD63), TSPAN31, TSPAN32, TSPAN33, TSPAN34; and
the anti-TLR antibody, or functional fragment thereof, specifically binds a toll-like receptor selected from the group consisting of TLR1, TLR2, TLR4, TLR5, TLR6, and TLR10.

3. The engineered extracellular vesicle of claim 1, wherein the tetraspanin is TSPAN30 (CD63).

4. The engineered extracellular vesicle of claim 1, wherein the anti-TLR antibody, or functional fragment thereof, Inhibits the binding of a cell surface TLR to a ligand of the TLR.

5. The engineered extracellular vesicle of claim 1, wherein the anti-TLR antibody, or functional fragment thereof, Inhibits dimerization of a cell surface TLR.

6. The engineered extracellular vesicle of claim 1, wherein the anti-TLR antibody, or functional fragment thereof, targets and inhibits cell surface TLR activation via neutralization (competitive or non-competitive inhibition).

7. The engineered extracellular vesicle of claim 1, wherein the extracellular vesicle is an exosome.

8. A pharmaceutical composition comprising the engineered extracellular vesicle, comprising a fusion protein having tetraspanin, or a functional fragment thereof, linked to an anti-TLR antibody, or a functional fragment thereof, that inhibits a cell surface expressed TR, and a pharmaceutically acceptable carrier or excipient.

9. A method of treating an inflammatory response in an individual in need thereof, the method comprising administering to the individual therapeutically effective amount of a pharmaceutical composition of claim 8.

10. The method of claim 9, wherein the inflammatory response is a symptom of viral infections including COVID-19, MERS, SARS, HIV, gram positive and negative bacterial infections or chronic immune activation.

11. The method of claim 9, wherein the composition is suitable for the treatment of a disease or malady selected from the group of: cytokine storm, COVID-19. Sjögren's syndrome, systemic inflammatory syndrome (SIRS, e.g. sepsis with and without documented pathogen), macrophage activation syndrome (MAS), severe acute respiratory syndrome (SARS), hantavirus pulmonary syndrome, disseminated vascular coagulopathy (DIC), glomerulonephritis, diabetes (Type 1 and 2), traumatic brain injury, transplant, graft vs. host disease, liver fibrosis, pulmonary fibrosis, chronic obstructive pulmonary disease, asthma, influenza, human immunodeficiency virus (HIV) infection, hepatitis infection, viral pneumonia, rheumatoid arthritis, acute lung injury, crush injury, traumatic injury, bone fracture, metabolic syndrome, atherosclerosis, Addison's Disease, pheochromocytoma, metastasis, hyperacute insect sting, anaphylaxis, necrosis associated with flesh-eating bacterial infection, kidney fibrosis, radiation therapy, frostbite, ischemia, reperfusion, myocardial infarction, myocarditis, bacterial pneumonia, bacterial sepsis, and Legionnaires disease.

12. The method of claim 9, wherein the inflammatory response is mediated by cell surface TLRs activation.

13. A method of treating, preventing or delaying the onset of cytokine storm in an individual suspected or at risk of developing septic shock, the method comprising administering to the individual a prophylactically effective amount of pharmaceutical composition of claim 8.

14. An exosome-based delivery system for delivering a therapeutic molecule to a cell, wherein said delivery system comprises a fusion protein comprising a therapeutic molecule comprising an anti-TLR antibody, or functional fragment thereof, fused with a tetraspanin, or functional fragment thereof, wherein said tetraspanin, or functional fragment thereof, is positioned at a surface of an exosome, and wherein said anti-TLR antibody, or functional fragment thereof, will serve as a targeting moiety and neutralizing its effects by inhibiting dimerization of TLR receptors thereby dampening proinflammatory responses.

15. The exosome-based delivery system of claim 14, wherein the tetraspanin member of the tetraspanin family of proteins is selected from the group consisting of TSPAN1, TSPAN2, TSPAN3, TSPAN4, TSPAN5, TSPAN6, TSPAN7, TSPAN8, TSPAN9, TSPAN10, TSPAN11, TSPAN12, TSPAN13, TSPAN14, TSPAN15, TSPAN16, TSPAN17, TSPAN18, TSPAN19, TSPAN20 (uroplakin 18), TSPAN21 (uroplakin1A) TSPAN22 (perpherin2), TSPAN23 (retinal outer segment membrane protein1), TSPAN24 (CD151), TSPAN25 (CD53), TSPAN26 (CD37), TSPAN27 (CD82), TSPAN28 (CD81), TSPAN29 (CD9), TSPAN30 (CD63), TSPAN31, TSPAN32, TSPAN33, and TSPAN34.

16. A fusion protein comprising a tetraspanin, or a functional fragment thereof, linked to an anti-TLR antibody, or a functional fragment thereof, that inhibits cell surface expressed TIR-mediated activation.

17. The fusion protein of claim 16, wherein the tetraspanin is selected from the group consisting of TSPAN1, TSPAN2, TSPAN3, TSPAN4, TSPAN5, TSPAN6, TSPAN7, TSPAN8, TSPAN9, TSPAN10, TSPAN11, TSPAN12, TSPAN13, TSPAN14, TSPAN15, TSPAN16, TSPAN17, TSPAN18, TSPAN19, TSPAN20 (uroplakin 11), TSPAN21 (uropiakin1A) TSPAN22 (peripherin2), TSPAN23 (retinal outer segment membrane protein1), TSPAN24 (CD151), TSPAN25 (CD53), TSPAN28 (CD37), TSPAN27 (CD82), TSPAN28 (CD81), TSPAN29 (CD9), TSPAN30 (CD63), TSPAN31, TSPAN32, TSPAN33, TSPAN34; and the anti-TLR antibody, or functional fragment thereof, specifically binds a toll-like receptor, or functional fragment thereof, wherein the toll-like receptor is selected from the group consisting of TLR1, TLR2, TLR4, TLR5, TLR6, and TLR10.
